(19) United States
(12) Patent Application Publication
(10) Pub. No.: US 2025/0283129 A1
(43) Pub. Date: Sep. 11, 2025

(54) PROCESS

(71) Applicant: Sun Pharmaceutical Industries Australia Pty Limited, Notting Hill (AU)

(72) Inventors: Xu Li, Melbourne (AU); Sally Louise Gras, Melbourne (AU); Garrick Westley Kyle Spencer, Melbourne (AU)

(73) Assignee: Sun Pharmaceutical Industries Australia Pty Limited, Notting Hill (AU)

(21) Appl. No.: 18/276,606

(22) PCT Filed: Feb. 9, 2022
(86) PCT No.: PCT/AU2022/050077

§ 371 Date: Aug. 9, 2023

(30) Foreign Application Priority Data
Feb. 10, 2021 (GB) 2101796.7

(51) Int. Cl. C12P 17/18; C12N 9/02; C12N 15/82

(52) U.S. Cl. CPC C12P 17/18; C12N 9/0071; C12N 15/8243; C12Y 114/11032

(57) ABSTRACT

The disclosure relates to a biotransformation for the manufacture of one or more opiate or opioid alkaloids using a crude poppy extract or a purified or semi-purified source of opiate or opioid alkaloid; vectors comprising nucleic acid molecules encoding enzymes; microbial cells expressing nucleic acids encoding said enzymes and including modified enzymes with enhanced activity.

### CROSS REFERENCE TO RELATED APPLICATIONS

[0001] This is the § 371 U.S. National Stage of International Application No. PCT/AU2022/050077, filed Feb. 9, 2022, which was published in English under PCT Article 21 (2), which in turn claims the benefit of GB Application No. 2101796.7, filed Feb. 10, 2021, which is incorporated herein by reference in its entirety.

### FIELD OF THE DISCLOSURE

[0002] The disclosure relates to a process for the manufacture of one or more opiate or opioid alkaloids wherein the process comprises the formation of a reaction mixture including a host cell transformed with one or more nucleic acid molecules encoding an enzyme catalysing at least one reaction in the conversion of an opiate alkaloid, including semi-synthetic opioid alkaloids, and reacting the mixture to convert said opiate alkaloid, or semi-synthetic opioid alkaloid, into a further opiate or opioid alkaloid and optionally extracting the product(s) of the reaction mixture; vectors comprising said nucleic acid molecules; and host cells expressing nucleic acids encoding polypeptides and modified polypeptides with altered or enhanced activity.

### SEQUENCE LISTING

[0003] The Sequence Listing is submitted as an ASCII text file in the form of the file named 8617-110547-01_ST25.txt, which was created on Feb. 2, 2024, and is 1,007,988 bytes, which is incorporated by reference herein.

### BACKGROUND TO THE DISCLOSURE

[0004] Opiates such as codeine and morphine are potent analgesics and are frequently used to treat moderate to strong pain. Semi-synthetic opioids such as oxycodone, oxymorphone, nalbuphine, naloxone, naltrexone, buprenorphine or etorphine have often a lower side effect profile when compared to codeine and morphine thus offering a valuable pain-management-alternative.

[0005] The biosynthetic pathway of morphinan alkaloids is well established and includes a series of enzymatic steps starting from dopamine and 4-hydroxyphenylacetaldehyde leading to the synthesis of R-reticuline which is subsequently transformed to thebaine. Thebaine is then converted to either oripavine by the codeine 3-O-demethylase (CODM) or transformed in several steps to codeine involving the activity of the thebaine-6-O-demethylase (T6ODM). Codeine is subsequently converted to morphine by de-methylation by CODM.

[0006] Thebaine is a starting material for the synthesis of some semi-synthetic opioids. Whilst opiate alkaloids can be extracted from latex, harvested from the green seed pods of opium poppy or from the poppy straw, which is the dried mature plant, the demand for the opiate alkaloids in general exceeds the available natural supply necessitating costly chemical synthesis. Thebaine, the chemical precursor of codeine, morphine and semi-synthetic opioids is readily converted in the plant and thus the level of thebaine in the wild type poppy plant is low.

[0007] WO2017/122011, which is incorporated by reference in its entirety, discloses the characterisation of the genomic locus encoding CODM genes in Papaver somniferum. The locus includes three closely linked CODM genes that are around 99% identical at the level of genomic sequence. Mutations in the CODM genes that affect enzyme activity are associated with elevated codeine and in plants carrying a deletion of each of the CODM genes the plants have very high levels of codeine. EP3398430, which is incorporated by reference in its entirety, is disclosed the characterisation of the genomic locus encoding T6ODM genes. The locus includes five T6ODM genes. In P. somniferum plants that carry mutations in both the CODM three gene cluster combined with mutations in T6ODM genes the resulting double mutants show high levels of thebaine. If CODM and T6ODM expression or activity is undetectable the resulting plants have very high levels of thebaine.

[0008] We disclose a process for the conversion of one or more opiate or opioid alkaloids to one or more opiate or opioid intermediates comprising forming a preparation comprising a host cell, for example a bacterial, fungal or plant cell, transformed with a one or more nucleic acids encoding an enzyme involved in opiate biotransformation, or an enzyme involved in the synthesis of semi-synthetic opioids such as oxycodone, oxymorphone, nalbuphine, naloxone, naltrexone, buprenorphine or etorphine.

[0009] We also disclose the use of a crude poppy extract obtained from a poppy, for example P. sominferum, incubating the preparation to obtain a biotransformation and optionally extracting one or more opiate or opioid alkaloids from the transformed preparation. The disclosure provides a scaled transformation of opiate alkaloids as an alternative to in planta extraction of opiate alkaloids from Papaver species. We also disclose CODM polypeptides carrying amino acid modifications which result in altered or enhanced CODM activity.

### STATEMENTS OF INVENTION

[0010] According to an aspect of the invention there is provided a method for the biotransformation of one or more opiate alkaloids or synthetic opioid alkaloids comprising the steps:
[0011] forming a preparation comprising a host cell transformed with one or more nucleic acid molecules encoding one or more polypeptides catalysing at least one reaction in the conversion of one or more opiate alkaloids or synthetic opioid alkaloids to one or more different opiate alkaloids or semi-synthetic opioid alkaloids;
[0012] incubating the reaction to allow transformation of one or more opiates alkaloids or semi-synthetic opioid alkaloids; and optionally
[0013] extracting said one or more transformed different opiate alkaloids or semi-synthetic opioid alkaloids from said preparation.

[0014] In a preferred method of the invention said preparation comprises naturally occurring opiate alkaloids.

[0015] In an alternative preferred method of the invention said preparation comprises semi-synthetic opioid alkaloids.

[0016] In a preferred method of the invention said preparation comprises a crude poppy extract comprising natural opiate alkaloids, for example, codeine, thebaine, codeinone and morphinone.

[0017] In a preferred method said preparation comprises an opiate alkaloid is selected from the group consisting of thebaine, oripavine, codeine, morphinone, neomorphinone, neopinone and codeinone, preferably thebaine and codeine.

[0018] In a preferred method said preparation comprises codeine or thebaine.

[0019] In a preferred method said one or more transformed different opiate alkaloids are selected from the group consisting of oripavine, codeine, morphinone, neomorphinone, neopinone and codeinone, preferably thebaine and codeine.

[0020] In a preferred method said one or more transformed different opiate alkaloids is oripavine and morphine.

[0021] In an alternative method of the invention said opioid alkaloid is a semi-synthetic opioid alkaloid selected from the group consisting of: oxycodone, oxymorphone, hydrocodone, hydromorphone, dihydrocodeine, dihydromorphine: 14-hydroxycodeine, 14-hydroxymorphine, noroxycodone, noroxymorphone, noroxycodeinone, noroxymorphinone, 14-hydroxy norcodeinone, 14-hydroxy normorphinone, 14-hydroxycodeinone, 14-hydroxymorphinone, buprenorphine intermediates such as for example N-cyclopropylmethyl-7α-(2-hydroxy-3,3-dimethyl-2-butyl)-6,14-endoethano-6,7,8,14-tetrahydronorthebaine or 7-acetyl-6,14-endoetheno-6,7,8,14-Tetrahydrothebaine, buprenorphine ((2S)-2-[17-(cyclopropylmethyl)-4,5α-epoxy-3-hydroxy-6-methoxy-6α,14-ethano-14α-morphinan-7α-γl]-3,3-dimethylbutan-2-ol), and etorphine intermediate.

[0022] Further examples of semi-synthetic opioid alkaloids as disclosed in US2019/0144900 which is incorporated by reference in its entirety.

[0023] In a preferred method of the invention said nucleic acid molecule comprises a nucleotide sequence selected from the group consisting of:
[0024] i) a nucleotide sequence as set forth in SEQ ID NO: 1, 2, 3, 4, 5, 6, 7, 8, 9, 10, 11, 12, 13, 14 or 15;
[0025] ii) a nucleotide sequence wherein said sequence is degenerate as a result of the genetic code to the nucleotide sequence defined in (i);
[0026] iii) a nucleic acid molecule comprising a nucleotide sequence the complementary strand of which hybridizes under stringent hybridization conditions to the sequence in SEQ ID NO: 1, 2, 3, 4, 5, 6, 7, 8, 9, 10, 11, 12, 13, 14 or 15 wherein said nucleic acid molecule encodes a codeine 3-O-demethylase;
[0027] iv) a nucleotide sequence that encodes a polypeptide comprising an amino acid sequence as represented in SEQ ID NO: 19, 20, 21, 22, 23, 24, 25, 26, 27, 28, 29, 30 or 31;
[0028] v) a nucleotide sequence that encodes a polypeptide comprising an amino acid sequence wherein said amino acid sequence is modified by addition, deletion or substitution of at least one amino acid residue as represented in iv) above and which has codeine 3-O-demethylase activity.

[0029] In a preferred embodiment of the invention said nucleotide sequence encoding codeine 3-O-demethylase polypeptide is set forth in SEQ ID NO: 3 or comprising a nucleotide sequence that is at least 90% identical to SEQ ID NO: 3.

[0030] Sequence homology is 90%, 91%, 92%, 93%, 94%, 95%, 96%, 97%, 98% or 99% identity or similarity to the full-length nucleotide or amino acid sequence herein disclosed.

[0031] In a preferred embodiment of the invention said nucleotide sequence encoding codeine 3-O-demethylase polypeptide is set forth in SEQ ID NO: 8 or comprising a nucleotide sequence that is at least 90% identical to SEQ ID NO: 8.

[0032] In a preferred embodiment of the invention said nucleotide sequence encoding codeine 3-O-demethylase polypeptide is selected from the group consisting of SEQ ID NO 1, 2, 4, 5, 6, 7, 9, 10, 11, 12, 13, 14 and 15, or comprising a nucleotide sequence that is at least 90% identical to SEQ ID NO: 1, 2, 4, 5, 6, 7, 9, 10, 11, 12, 13, 14 and 15.

[0033] In a preferred embodiment of the invention said codeine 3-O-demethylase polypeptide comprises an amino acid sequence as set forth in SEQ ID NO: 19, or a polypeptide comprising the amino acid sequence that is at least 90% identical to SEQ ID NO: 19.

[0034] In a preferred embodiment of the invention said codeine 3-O-demethylase polypeptide comprises an amino acid sequence as set forth in SEQ ID NO: 20, or a polypeptide comprising the amino acid sequence that is at least 90% identical to SEQ ID NO: 20 and includes the amino acid substitution E259K.

[0035] In a preferred embodiment of the invention said codeine 3-O-demethylase polypeptide comprises an amino acid sequence as set forth in SEQ ID NO: 21, or a polypeptide comprising the amino acid sequence that is at least 90% identical to SEQ ID NO: 21 and includes the amino acid substitution E259D.

[0036] In a preferred embodiment of the invention said codeine 3-O-demethylase polypeptide comprises an amino acid sequence as set forth in SEQ ID NO: 22, or a polypeptide comprising the amino acid sequence that is at least 90% identical to SEQ ID NO: 22 and includes the amino acid substitution E259H.

[0037] In a preferred embodiment of the invention said codeine 3-O-demethylase polypeptide comprises an amino acid sequence as set forth in SEQ ID NO: 23, or a polypeptide comprising the amino acid sequence that is at least 90% identical to SEQ ID NO: 23 and includes the amino acid substitution E259Q.

[0038] In a preferred embodiment of the invention said codeine 3-O-demethylase polypeptide comprises an amino acid sequence as set forth in SEQ ID NO: 24, or a polypeptide comprising the amino acid sequence that is at least 90% identical to SEQ ID NO: 24 and includes the amino acid substitution E259A.

[0039] In a preferred embodiment of the invention said codeine 3-O-demethylase polypeptide comprises an amino acid sequence as set forth in SEQ ID NO: 25, or a polypeptide comprising the amino acid sequence that is at least 90% identical to SEQ ID NO: 25 and includes the amino acid substitution E259S.

[0040] In a preferred embodiment of the invention said codeine 3-O-demethylase polypeptide comprises an amino acid sequence as set forth in SEQ ID NO: 26 or a codeine 3-O-demethylase polypeptide comprising the amino acid sequence that is at least 90% identical to SEQ ID NO: 26 and includes the amino acid substitution E259G.

[0041] In a preferred embodiment of the invention said codeine 3-O-demethylase polypeptide comprises an amino acid sequence as set forth in SEQ ID NO: 27, or a polypeptide comprising the amino acid sequence that is at least 90% identical to SEQ ID NO: 27 and includes the amino acid substitution R260T.

[0042] In a preferred embodiment of the invention said codeine 3-O-demethylase polypeptide comprises an amino acid sequence as set forth in SEQ ID NO: 28, or a polypeptide comprising the amino acid sequence that is at least 90% identical to SEQ ID NO: 28 and includes the amino acid substitution E259G and R260T.

[0043] In a preferred embodiment of the invention said codeine 3-O-demethylase polypeptide comprises an amino acid sequence as set forth in SEQ ID NO: 29, or a polypeptide comprising the amino acid sequence that is at least 90% identical to SEQ ID NO: 29 and includes the amino acid substitution R260K.

[0044] In a preferred embodiment of the invention said codeine 3-O-demethylase polypeptide comprises an amino acid sequence as set forth in SEQ ID NO: 30, or a polypeptide comprising the amino acid sequence that is at least 90% identical to SEQ ID NO: 30 and includes the amino acid substitution E259D and R260K.

[0045] In a preferred embodiment of the invention said codeine 3-O-demethylase polypeptide comprises an amino acid sequence as set forth in SEQ ID NO: 31, or a polypeptide comprising the amino acid sequence that is at least 90% identical to SEQ ID NO: 31 and includes the amino acid substitution E259G and R260K.

[0046] In a preferred method of the invention said nucleic acid molecule comprises a nucleotide sequence selected from the group consisting of:
[0047] i) a nucleotide sequence as set forth in SEQ ID NO: 37, 38, 39, 40, 41, 42, 43, 44, 45, 46, 47, 48, 49, 50, 51 or 52;
[0048] ii) a nucleotide sequence wherein said sequence is degenerate as a result of the genetic code to the nucleotide sequence defined in (i);
[0049] iii) a nucleic acid molecule comprising a nucleotide sequence the complementary strand of which hybridizes under stringent hybridization conditions to the sequence in SEQ ID NO: 37, 38, 39, 40, 41, 42, 43, 44, 45, 46, 47, 48, 49, 50, 51 or 52 wherein said nucleic acid molecule encodes a codeine 3-O-demethylase;
[0050] iv) a nucleotide sequence that encodes a polypeptide comprising an amino acid sequence as represented in SEQ ID NO: 53, 54, 55, 56, 57, 58, 59, 60, 61, 62, 63, 64, 65, 66, 67 or 68;
[0051] v) a nucleotide sequence that encodes a polypeptide comprising an amino acid sequence wherein said amino acid sequence is modified by addition, deletion or substitution of at least one amino acid residue as represented in iv) above and which has codeine 3-O-demethylase activity.

[0052] In a preferred embodiment of the invention said nucleotide sequence encoding codeine 3-O-demethylase polypeptide is selected from the group consisting of SEQ ID NO 37, 38, 39, 40, 41, 42, 43, 44, 45, 46, 47, 48, 49, 50, 51 and 52, or comprising a nucleotide sequence that is at least 90% identical to a sequence selected from the group consisting of: SEQ ID NO: 37, 38, 39, 40, 41, 42, 43, 44, 45, 46, 47, 48, 49, 50, 51 and 52.

[0053] In a preferred embodiment of the invention said nucleotide sequence encoding a codeine 3-O-demethylase polypeptide is set forth in SEQ ID NO: 47 or comprising a nucleotide sequence that is at least 90% identical to SEQ ID NO: 47.

[0054] In a preferred embodiment of the invention said nucleotide sequence encoding a codeine 3-O-demethylase polypeptide is set forth in SEQ ID NO: 43 or comprising a nucleotide sequence that is at least 90% identical to SEQ ID NO: 43.

[0055] In a preferred embodiment of the invention said nucleotide sequence encoding a codeine 3-O-demethylase polypeptide is set forth in SEQ ID NO: 52 or comprising a nucleotide sequence that is at least 90% identical to SEQ ID NO: 52.

[0056] In a preferred embodiment of the invention said nucleotide sequence encoding a codeine 3-O-demethylase polypeptide is set forth in SEQ ID NO: 51 or comprising a nucleotide sequence that is at least 90% identical to SEQ ID NO: 51.

[0057] In a preferred embodiment of the invention said nucleotide sequence encoding a codeine 3-O-demethylase polypeptide is set forth in SEQ ID NO: 50 or comprising a nucleotide sequence that is at least 90% identical to SEQ ID NO: 50.

[0058] In a preferred embodiment of the invention said codeine 3-O-demethylase polypeptide comprises an amino acid sequence as set forth in SEQ ID NO: 53, or a polypeptide comprising the amino acid sequence that is at least 90% identical to SEQ ID NO: 53.

[0059] In a preferred embodiment of the invention said codeine 3-O-demethylase polypeptide comprises an amino acid sequence as set forth in SEQ ID NO: 54, or a polypeptide comprising the amino acid sequence that is at least 90% identical to SEQ ID NO: 54 and includes the amino acid substitution T3K, P4A, 15K and 17M.

[0060] In a preferred embodiment of the invention said codeine 3-O-demethylase polypeptide comprises an amino acid sequence as set forth in SEQ ID NO: 55, or a polypeptide comprising the amino acid sequence that is at least 90% identical to SEQ ID NO: 55 and includes the amino acid substitution Y357S and M360I.

[0061] In a preferred embodiment of the invention said codeine 3-O-demethylase polypeptide comprises an amino acid sequence as set forth in SEQ ID NO: 56, or a polypeptide comprising the amino acid sequence that is at least 90% identical to SEQ ID NO: 56 and includes the amino acid substitution T3K, P4A, 15K, 17M, Y357S and M360I.

[0062] In a preferred embodiment of the invention said codeine 3-O-demethylase polypeptide comprises an amino acid sequence as set forth in SEQ ID NO: 57, or a polypeptide comprising the amino acid sequence that is at least 90% identical to SEQ ID NO: 57 and includes the amino acid substitution T3K.

[0063] In a preferred embodiment of the invention said codeine 3-O-demethylase polypeptide comprises an amino acid sequence as set forth in SEQ ID NO: 58, or a polypeptide comprising the amino acid sequence that is at least 90% identical to SEQ ID NO: 58 and includes the amino acid substitution P4A.

[0064] In a preferred embodiment of the invention said codeine 3-O-demethylase polypeptide comprises an amino acid sequence as set forth in SEQ ID NO: 59, or a polypeptide comprising the amino acid sequence that is at least 90% identical to SEQ ID NO: 59 and includes the amino acid substitution 15K.

[0065] In a preferred embodiment of the invention said codeine 3-O-demethylase polypeptide comprises an amino acid sequence as set forth in SEQ ID NO: 60 or a codeine 3-O-demethylase polypeptide comprising the amino acid sequence that is at least 90% identical to SEQ ID NO: 60 and includes the amino acid substitution 17M.

[0066] In a preferred embodiment of the invention said codeine 3-O-demethylase polypeptide comprises an amino acid sequence as set forth in SEQ ID NO: 61, or a polypeptide comprising the amino acid sequence that is at least 90% identical to SEQ ID NO: 61 and includes the amino acid substitution Y357S.

[0067] In a preferred embodiment of the invention said codeine 3-O-demethylase polypeptide comprises an amino acid sequence as set forth in SEQ ID NO: 62, or a polypeptide comprising the amino acid sequence that is at least 90% identical to SEQ ID NO: 62 and includes the amino acid substitution M360I.

[0068] In a preferred embodiment of the invention said codeine 3-O-demethylase polypeptide comprises an amino acid sequence as set forth in SEQ ID NO: 63, or a polypeptide comprising the amino acid sequence that is at least 90% identical to SEQ ID NO: 63 and includes the amino acid substitution 15K and M360I.

[0069] In a preferred embodiment of the invention said codeine 3-O-demethylase polypeptide comprises an amino acid sequence as set forth in SEQ ID NO: 64, or a polypeptide comprising the amino acid sequence that is at least 90% identical to SEQ ID NO: 64 and includes the amino acid substitution 15K and E259G.

[0070] In a preferred embodiment of the invention said codeine 3-O-demethylase polypeptide comprises an amino acid sequence as set forth in SEQ ID NO: 65, or a polypeptide comprising the amino acid sequence that is at least 90% identical to SEQ ID NO: 65 and includes the amino acid substitution E259G and M360I.

[0071] In a preferred embodiment of the invention said codeine 3-O-demethylase polypeptide comprises an amino acid sequence as set forth in SEQ ID NO: 66, or a polypeptide comprising the amino acid sequence that is at least 90% identical to SEQ ID NO: 66 and includes the amino acid substitution 15K, E259G and M360I.

[0072] In a preferred embodiment of the invention said codeine 3-O-demethylase polypeptide comprises an amino acid sequence as set forth in SEQ ID NO: 67, or a polypeptide comprising the amino acid sequence that is at least 90% identical to SEQ ID NO: 67 and includes the amino acid substitution P4A, E259G and M360I.

[0073] In a preferred embodiment of the invention said codeine 3-O-demethylase polypeptide comprises an amino acid sequence as set forth in SEQ ID NO: 68, or a polypeptide comprising the amino acid sequence that is at least 90% identical to SEQ ID NO: 68 and includes the amino acid substitution P4A, 15K, E259G and M360I.

[0074] In a preferred method of the invention said nucleic acid molecule comprises a nucleotide sequence selected from the group consisting of:
[0075] i) a nucleotide sequence as set forth in SEQ ID NO: 16;
[0076] ii) a nucleotide sequence wherein said sequence is degenerate as a result of the genetic code to the nucleotide sequence defined in i);
[0077] iii) a nucleic acid molecule comprising a nucleotide sequence the complementary strand of which hybridizes under stringent hybridization conditions to the sequence in SEQ ID NO: 16 wherein said nucleic acid molecule encodes a thebaine 6-O-demethylase;
[0078] iv) a nucleotide sequence that encodes a polypeptide comprising an amino acid sequence as represented in SEQ ID NO: 32;
[0079] v) a nucleotide sequence that encodes a polypeptide comprising an amino acid sequence wherein said amino acid sequence is modified by addition deletion or substitution of at least one amino acid residue as represented in iv) above and which has thebaine 6-O-demethylase activity.

[0080] In a preferred method of the invention said nucleic acid molecule comprises a nucleotide sequence selected from the group consisting of:
[0081] i) a nucleotide sequence as set forth in SEQ ID NO: 18;
[0082] ii) a nucleotide sequence wherein said sequence is degenerate as a result of the genetic code to the nucleotide sequence defined in i);
[0083] iii) a nucleic acid molecule comprising a nucleotide sequence the complementary strand of which hybridizes under stringent hybridization conditions to the sequence in SEQ ID NO: 18 wherein said nucleic acid molecule encodes a codeinone reductase;
[0084] iv) a nucleotide sequence that encodes a polypeptide comprising an amino acid sequence as represented in SEQ ID NO: 34;
[0085] v) a nucleotide sequence that encodes a polypeptide comprising an amino acid sequence wherein said amino acid sequence is modified by addition deletion or substitution of at least one amino acid residue as represented in iv) above and which has codeinone reductase activity.

[0086] In a preferred method of the invention of the invention said nucleic acid molecule comprises a nucleotide sequence selected from the group consisting of:
[0087] i) a nucleotide sequence as set forth in SEQ ID NO: 17;
[0088] ii) a nucleotide sequence wherein said sequence is degenerate as a result of the genetic code to the nucleotide sequence defined in i);
[0089] iii) a nucleic acid molecule comprising a nucleotide sequence the complementary strand of which hybridizes under stringent hybridization conditions to the sequence in SEQ ID NO: 17 wherein said nucleic acid molecule encodes a neopinone isomerase;
[0090] iv) a nucleotide sequence that encodes a polypeptide comprising an amino acid sequence as represented in SEQ ID NO: 33;
[0091] v) a nucleotide sequence that encodes a polypeptide comprising an amino acid sequence wherein said amino acid sequence is modified by addition deletion or substitution of at least one amino acid residue as represented in iv) above and which has neopinone isomerase activity.

[0092] Hybridization of a nucleic acid molecule occurs when two complementary nucleic acid molecules undergo an amount of hydrogen bonding to each other. The stringency of hybridization can vary according to the environmental conditions surrounding the nucleic acids, the nature of the hybridization method, and the composition and length of the nucleic acid molecules used. Calculations regarding hybridization conditions required for attaining particular degrees of stringency are discussed in Sambrook et al., Molecular Cloning: A Laboratory Manual (Cold Spring Harbor Laboratory Press, Cold Spring Harbor, NY, 2001); and Tijssen, Laboratory Techniques in Biochemistry and Molecular Biology-Hybridization with Nucleic Acid Probes Part I, Chapter 2 (Elsevier, New York, 1993). The Tm is the temperature at which 50% of a given strand of a nucleic acid molecule is hybridized to its complementary strand. The following is an exemplary set of hybridization conditions and is not limiting:

Very High Stringency (Allows Sequences that Share at Least 90%, 91%, 92%, 93%, 94%, 95%, 96%, 97%, 98% or 99% Identity to Hybridize)
[0093] Hybridization: 5×SSC at 65° C. for 16 hours
[0094] Wash twice: 2×SSC at room temperature (RT) for 15 minutes each
[0095] Wash twice: 0.5×SSC at 65° C. for 20 minutes each
   High Stringency (Allows Sequences that Share at Least 80%, 81%, 82%, 83%, 84%, 85%, 86%, 87%, 88% or 89% Identity to Hybridize)
[0096] Hybridization: 5×-6×SSC at 65° C.-70° C. for 16-20 hours
[0097] Wash twice: 2×SSC at RT for 5-20 minutes each
[0098] Wash twice: 1×SSC at 55° C.-70° C. for 30 minutes each
   Low Stringency (Allows Sequences that Share at Least 70%, 71%, 72%, 73%, 74%, 75%, 76%, 77%, 78% or 79% Identity to Hybridize)
[0099] Hybridization: 6×SSC at RT to 55° C. for 16-20 hours
[0100] Wash at least twice: 2×-3×SSC at RT to 55° C. for 20-30 minutes each.

[0101] In a preferred method of the invention said host cell is a eukaryotic cell.

[0102] In a preferred method of the invention said eukaryotic cell is a plant cell, for example a Papaver species plant cell e.g., P. somniferum cell.

[0103] In a preferred method of the invention said eukaryotic cell is a microbial cell, for example a Saccharomyces cerevisiae cell or Pichia pastoris cell.

[0104] In an alternative preferred method of the invention said host cell is a prokaryotic cell.

[0105] In a further alternative preferred embodiment of the invention said prokaryotic cell is a bacterial cell, for example an Escherichia coli (E. coli) cell.

[0106] If microorganisms are used as organisms in the process according to the invention, they are grown or cultured in the manner with which the skilled worker is familiar, depending on the host organism. As a rule, microorganisms are grown in a liquid medium comprising a carbon source, usually in the form of sugars, a nitrogen source, usually in the form of organic nitrogen sources such as yeast extract or salts such as ammonium sulfate, trace elements such as salts of iron, manganese and magnesium and, if appropriate, vitamins, at temperatures of between 0° C. and 100° C., preferably between 10° C. and 60° C., while gassing in oxygen.

[0107] The pH of the liquid medium can either be kept constant, regulated during the culturing period, or not. The cultures can be grown batchwise, semi-batchwise, or continuously. Nutrients can be provided at the beginning of the fermentation or fed in semi-continuously or continuously. These products can be isolated from the organisms as described above by processes known to the skilled worker, for example, selective extraction from an aqueous phase into and out of an immiscible organic solvent through the manipulation of product solubilities by pH adjustment with acids or bases. Purification using adsorbents and or formation of crystals by changing the solubility of the target compounds using temperature, polarity of the solution, pH of the solution, formation of salts of the target compounds, thereby allowing isolation of the desired products. To this end, the organisms can advantageously be disrupted beforehand. In this process the pH value is advantageously kept between 4 and 12, preferably between pH 6 and 9, especially preferably between pH 7 and 8.

[0108] An overview of known cultivation methods can be found in the textbook by Chmiel (Bioprozeßtechnik 1. Einführung in die Bioverfahrenstechnik [Bioprocess technology 1. Introduction to Bioprocess technology] (Gustav Fischer Verlag, Stuttgart, 1991)) or in the textbook by Storhas (Bioreaktoren und periphere Einrichtungen [Bioreactors and peripheral equipment] (Vieweg Verlag, Brunswick/Wiesbaden, 1994)).

[0109] The culture medium to be used must suitably meet the requirements of the strains in question. Descriptions of culture media for various microorganisms can be found in the textbook “Manual of Methods for General Bacteriology” of the American Society for Bacteriology (Washington D.C., USA, 1981).

[0110] As described above, these media which can be employed in accordance with the invention usually comprise one or more carbon sources, nitrogen sources, inorganic salts, vitamins and/or trace elements.

[0111] Preferred carbon sources are sugars, such as mono-, di- or polysaccharides. Examples of carbon sources are glucose, fructose, mannose, galactose, ribose, sorbose, ribulose, lactose, maltose, sucrose, raffinose, starch or cellulose. Sugars can also be added to the media via complex mixtures such as molasses or other by-products from sugar refining. The addition of mixtures of a variety of carbon sources may also be advantageous. Other possible carbon sources are oils and fats such as, for example, soya oil, sunflower oil, peanut oil and/or coconut fat, fatty acids such as, for example, palmitic acid, stearic acid and/or linoleic acid, alcohols and/or polyalcohols such as, for example, glycerol, methanol and/or ethanol, and/or organic acids such as, for example, acetic acid and/or lactic acid.

[0112] Nitrogen sources are usually organic or inorganic nitrogen compounds or materials comprising these compounds. Examples of nitrogen sources comprise ammonia in liquid or gaseous form or ammonium salts such as ammonium sulfate, ammonium chloride, ammonium phosphate, ammonium carbonate or ammonium nitrate, nitrates, urea, amino acids or complex nitrogen sources such as cornsteep liquor, soya meal, soya protein, yeast extract, meat extract and others. The nitrogen sources can be used individually or as a mixture.

[0113] Inorganic salt compounds which may be present in the media comprise the chloride, phosphorus and sulfate salts of calcium, magnesium, sodium, cobalt, molybdenum, potassium, manganese, zinc, copper and iron.

[0114] Inorganic sulfur-containing compounds such as, for example, sulfates, sulfites, dithionites, tetrathionates, thiosulfates, sulfides, or else organic sulfur compounds such as mercaptans and thiols may be used as sources of sulfur for the production of sulfur-containing fine chemicals, in particular of methionine.

[0115] Phosphoric acid, potassium dihydrogen phosphate or dipotassium hydrogen phosphate or the corresponding sodium-containing salts may be used as sources of phosphorus.

[0116] Chelating agents may be added to the medium to keep the metal ions in solution. Particularly suitable chelating agents comprise dihydroxyphenols such as catechol or protocatechuate and organic acids such as citric acid.

[0117] The fermentation media used according to the invention for culturing microorganisms usually also comprise other growth factors such as vitamins or growth promoters, which include, for example, biotin, riboflavin, thiamine, folic acid, nicotinic acid, panthothenate and pyridoxine. Growth factors and salts are frequently derived from complex media components such as yeast extract, molasses, cornsteep liquor and the like. It is moreover possible to add suitable precursors to the culture medium. The exact composition of the media compounds heavily depends on the particular experiment and is decided upon individually for each specific case. Information on the optimization of media can be found in the textbook “Applied Microbiol. Physiology, A Practical Approach” (Editors P. M. Rhodes, P. F. Stanbury, IRL Press (1997) pp. 53-73, ISBN 0 19 963577 3). Growth media can also be obtained from commercial suppliers, for example Standard 1 (Merck) or BHI (brain heart infusion, DIFCO) and the like.

[0118] All media components are sterilized, either by heat (20 min at 1.5 bar and 121° C.) or by filter sterilization. The components may be sterilized either together or, if required, separately. All media components may be present at the start of the cultivation or added continuously or batchwise, as desired.

[0119] The culture temperature is normally between 15° C. and 45° C., preferably at from 25° C. to 40° C. and may be kept constant or may be altered during the experiment. The pH of the medium should be in the range from 5.0 to 8.5, preferably around 7.0. The pH for cultivation can be controlled during cultivation by adding basic compounds such as sodium hydroxide, potassium hydroxide, ammonia and aqueous ammonia or acidic compounds such as phosphoric acid, acetic acid or sulfuric acid. Foaming can be controlled by employing antifoams such as, for example, fatty acid polyglycol esters. To maintain the stability of plasmids it is possible to add to the medium suitable substances having a selective effect, for example antibiotics. Aerobic conditions are maintained by introducing oxygen or oxygen-containing gas mixtures such as, for example, ambient air into the culture. The temperature of the culture is normally 20° C. to 45° C. and preferably 25° C. to 40° C. The culture is continued until formation of the desired product is at a maximum. This aim is normally achieved within 10 to 160 hours.

[0120] The fermentation broths obtained in this way, those comprising polyunsaturated fatty acids, usually contain a dry mass of from 7.5% to 25% by weight.

[0121] The fermentation broth can then be processed further. The biomass may, according to requirement, be removed completely or partially from the fermentation broth by separation methods such as, for example, centrifugation, filtration, decanting or a combination of these methods or be left completely in said broth. It is advantageous to process the biomass after its separation.

[0122] However, the fermentation broth can also be thickened or concentrated without separating the cells, using known methods such as, for example, with the aid of a rotary evaporator, thin-film evaporator, falling-film evaporator, by reverse osmosis or by nanofiltration. Finally, this concentrated fermentation broth can be processed to obtain the opiate alkaloids present therein.

[0123] In a preferred method of the invention said crude poppy extract is obtained from a Papaver somniferum or Papaver bracteatum plant.

[0124] Information on the optimization of extraction methods can be found in the textbook “Natural Product Extraction, Principles and Applications” (Edited by M Rostagno and J Prado, RSC Publishing (2013), ISBN 978 1 84973 606 0).

[0125] Preferably, said Papaver species naturally comprises high levels of one or more opiate alkaloid(s).

[0126] In an alternative preferred method of the invention said Papaver species is modified wherein said modification is a genomic modification wherein said genomic modification is associated with elevated opiate alkaloid content.

[0127] In a preferred method of the invention said Papaver species is P. somniferum and said modification is mutation(s) in one or more codeine 3-O-demethylase.

[0128] In a preferred method of the invention said P. somniferum plant is modified wherein the plant is deleted or mutated for one, two or three linked codeine 3-O-demethylase genes encoded by a nucleic acid molecule comprising the nucleotide sequence set forth in SEQ ID NO: 1, or a nucleic acid molecule comprising a nucleotide sequence that is 95-99% identical to the nucleotide sequence set forth in SEQ ID NO: 1.

[0129] In a preferred method of the invention said P. somniferum plant is modified wherein the plant is deleted or mutated for one, two or three linked codeine 3-O-demethylase genes encoded by a nucleic acid molecule comprising the nucleotide sequence set forth in SEQ ID NO: 37, or a nucleic acid molecule comprising a nucleotide sequence that is 95-99% identical to the nucleotide sequence set forth in SEQ ID NO: 37.

[0130] In a preferred method of the invention said P. somniferum plant is modified by deletion of all or part of a nucleic acid molecule comprising or consisting of the nucleotide sequence as set forth in SEQ ID NO: 35 wherein one, two or three linked codeine 3-O-demethylase genes are deleted or mutated.

[0131] In a preferred method of the invention said P. somniferum plant is deleted for each codeine 3-O-demethylase gene wherein codeine 3-O-demethylase activity is undetectable.

[0132] The term “gene” is not limited to the open reading frame but can also extend to promoter regions and other regulatory sequences. For example, the activity of an enzyme can be undetectable due to deleted or mutated regulatory regions which results in a lack of gene expression and subsequently enzyme activity.

[0133] In a preferred method of the invention said P. somniferum plant comprises a modification wherein said modification is deletion or mutation in one or more thebaine 6-O-demethylases.

[0134] In a preferred method of the invention said P. somniferum plant is modified wherein the plant is deleted or mutated for one, two, three, four or five linked thebaine 6-O-demethylase genes encoded by a nucleic acid molecule comprising the nucleotide sequence set forth in SEQ ID NO: 16, or a nucleic acid molecule comprising a nucleotide sequence that is 95-99% identical to the nucleotide sequence set forth in SEQ ID NO: 16.

[0135] In a preferred method of the invention said P. somniferum plant is modified by deletion of all or part of a nucleic acid molecule comprising or consisting of the nucleotide sequence as set forth in SEQ ID NO: 36 wherein one, two, three, four or five linked thebaine 6-O-demethylase genes are deleted or mutated.

[0136] In a preferred method of the invention said P. somniferum plant is deleted for each thebaine 6-O-demethylase gene wherein 6-O-demethylase activity is undetectable.

[0137] In a preferred method of the invention said P. somniferum plant is modified and comprises:
[0138] a genomic modification to one, two or three genes encoding codeine 3-O-demethylases,
[0139] a genomic modification to one, two, three, four or five genes encoding thebaine 6-O-demethylases,
   wherein the expression of codeine 3-O-demethylases or the activity of codeine 3-O-demethylases is reduced or undetectable and further wherein the expression of said thebaine 6-O-demethylases or activity of thebaine 6-O-demethylases is reduced or undetectable wherein the modified plant has elevated levels of thebaine when compared to a wild type P. somniferum plant and comprising functional genes encoding codeine 3-O-demethylase(s) and functional genes encoding thebaine 6-O-demethylase(s).

[0140] According to a further aspect of the invention there is provided a modified codeine 3-O-demethylase polypeptide wherein the activity of said modified codeine 3-O-demethylase polypeptide is altered.

[0141] In a preferred embodiment of the invention said modification is to an amino acid sequence as set forth in SEQ ID NO: 19 wherein said polypeptide is modified by addition, deletion or substitution of at least one amino acid residue.

[0142] In a preferred embodiment of the invention said modified codeine 3-O-demethylase polypeptide is modified at amino acid position 259.

[0143] In an alternative embodiment of the invention said modified codeine 3-O-demethylase polypeptide is modified at amino acid position 260.

[0144] In a further alternative preferred embodiment of the invention said modified codeine 3-O-demethylase polypeptide is modified at amino acid position 259 and 260.

[0145] In a preferred embodiment of the invention said modified codeine 3-O-demethylase polypeptide is selected from the group consisting of SEQ ID NO: 20, 21, 22, 23, 24, 25, 26, 27, 28, 29, 30 or 31.

[0146] In a preferred embodiment of the invention said modification is to an amino acid sequence as set forth in SEQ ID NO: 53 wherein said polypeptide is modified by addition, deletion or substitution of at least one amino acid residue.

[0147] In a further alternative preferred embodiment of the invention said modified codeine 3-O-demethylase polypeptide is modified at amino acid position 3.

[0148] In a further alternative preferred embodiment of the invention said modified codeine 3-O-demethylase polypeptide is modified at amino acid position 4.

[0149] In a further alternative preferred embodiment of the invention said modified codeine 3-O-demethylase polypeptide is modified at amino acid position 5.

[0150] In a further alternative preferred embodiment of the invention said modified codeine 3-O-demethylase polypeptide is modified at amino acid position 7.

[0151] In a further alternative preferred embodiment of the invention said modified codeine 3-O-demethylase polypeptide is modified at amino acid position 259.

[0152] In a further alternative preferred embodiment of the invention said modified codeine 3-O-demethylase polypeptide is modified at amino acid position 357.

[0153] In a further alternative preferred embodiment of the invention said modified codeine 3-O-demethylase polypeptide is modified at amino acid position 360.

[0154] In a further alternative preferred embodiment of the invention said modified codeine 3-O-demethylase polypeptide is modified at amino acid position 3, 4, 5, 7, 259, 357 and/or 360, or combinations thereof, optionally at positions selected from the group consisting of i) 357 and 360, ii) 5 and 360, iii) 5 and 259, iv) 259 and 360, v) 5, 259 and 360, vi) 4, 259 and 360, vii) 4, 5, 259 and 360, viii) 3, 4, 5 and 7, and ix) 3, 4, 5, 7, 357 and 360.

[0155] Preferably, said modified codeine 3-O-demethylase polypeptide is modified at amino acid position 3, 4, 5, 7, 259, 260, 357 and/or 360 or combinations thereof.

[0156] In an alternative preferred embodiment of the invention said modified codeine 3-O-demethylase polypeptide is selected from the group consisting of SEQ ID NO: 54, 55, 56, 57, 58, 59, 60, 61, 62, 63, 64, 65, 66, 67 or 68.

[0157] In a preferred embodiment of the invention said modified codeine 3-O-demethylase polypeptide has enhanced activity when compared to a wild type codeine 3-O-demethylase polypeptide as represented by the amino acid sequence set forth in SEQ ID NO: 19.

[0158] In a preferred embodiment of the invention said enhanced codeine 3-O-demethylase activity is at least 10% higher when compared to a wild-type codeine 3-O-demethylase as represented by the amino acid sequence set forth in SEQ ID NO: 19.

[0159] In a preferred embodiment of the invention said enhanced codeine 3-O-demethylase activity is at least 15%, 20%, 25%, 30%, 35%, 40%, 45%, 50%, 60%, 70%, 80%, 90% or 100% higher when compared to a wild-type codeine 3-O-demethylase polypeptide as represented by the amino acid sequence set forth in SEQ ID NO: 19.

[0160] In a preferred embodiment of the invention said modified codeine 3-O-demethylase polypeptide is represented by the amino acid sequence set forth in SEQ ID NO: 21.

[0161] In a preferred embodiment of the invention said modified codeine 3-O-demethylase polypeptide is represented by the amino acid sequence set forth in SEQ ID NO: 26.

[0162] In a preferred embodiment of the invention said modified codeine 3-O-demethylase polypeptide is represented by the amino acid sequence selected from the group consisting of a sequence set forth in SEQ ID NO: 22, 23, 24, 25, 27, 28, 29, 30 and 31.

[0163] In a preferred embodiment of the invention said modified codeine 3-O-demethylase polypeptide has enhanced activity when compared to a wild type codeine 3-O-demethylase polypeptide as represented by the amino acid sequence set forth in SEQ ID NO: 53.

[0164] In a preferred embodiment of the invention said enhanced codeine 3-O-demethylase activity is at least 10% higher when compared to a wild-type codeine 3-O-demethylase as represented by the amino acid sequence set forth in SEQ ID NO: 53.

[0165] In a preferred embodiment of the invention said enhanced codeine 3-O-demethylase activity is at least 15%, 20%, 25%, 30%, 35%, 40%, 45%, 50%, 60%, 70%, 80%, 90% or 100% higher when compared to a wild-type codeine 3-O-demethylase polypeptide as represented by the amino acid sequence set forth in SEQ ID NO: 53.

[0166] Codeine and thebaine are substrates of the codeine 3-O-demethylase polypeptide. We disclose that the substrate specificity of the codeine 3-O-demethylase polypeptide to codeine and thebaine can change dependent on the specific mutation. This is measurable by a reduced oripavine yield when compared to the yield obtained when using the wild type enzyme and when compared to the morphine yield. See for example FIG. 5. After 4 hours the average thebaine to oripavine yield for the 17M strain was only 6%, vs 47% for the WT CODM expressing strain. While the average codeine to morphine yield was 32% and 47% for the 17M and WT CODM expressing strains, respectively.

[0167] In a preferred embodiment of the invention said modified codeine 3-O-demethylase polypeptide has altered substrate specificity when compared to a wild type codeine 3-O-demethylase polypeptide as represented by the amino acid sequence set forth in SEQ ID NO: 53 or 19.

[0168] In a preferred embodiment of the invention said altered substrate specificity is represented by an increase or decrease in oripavine yield when compared to the wild type yield.

[0169] In a preferred embodiment of the invention said altered substrate specificity is represented by an increase or decrease in morphine yield when compared to the wild type yield.

[0170] In a preferred embodiment of the invention SEQ ID NO 54, 55, 56, 60 and 61 show a higher substrate specificity for thebaine when compared to codeine and when compared to the wild type.

[0171] In a preferred embodiment of the invention SEQ ID NO 57, 58, 59, 62. 63. 64. 65. 66. 67 and 68 show a higher substrate specificity for codeine when compared to thebaine and when compared to the wild type.

[0172] In a preferred embodiment of the invention said modified codeine 3-O-demethylase polypeptide is represented by the amino acid sequence selected from the group consisting of SEQ ID NO 54, 55, 56, 57, 58, 59, 60, 61, 62, 63, 64, 65, 67 and 68.

[0173] In a preferred embodiment of the invention said modified codeine 3-O-demethylase polypeptide is represented by the amino acid sequence set forth in SEQ ID NO: 49.

[0174] In a preferred embodiment of the invention said modified codeine 3-O-demethylase polypeptide is represented by the amino acid sequence set forth in SEQ ID NO: 55.

[0175] In a preferred embodiment of the invention said modified codeine 3-O-demethylase polypeptide is represented by the amino acid sequence set forth in SEQ ID NO: 56.

[0176] In a preferred embodiment of the invention said modified codeine 3-O-demethylase polypeptide is represented by the amino acid sequence set forth in SEQ ID NO: 57.

[0177] In a preferred embodiment of the invention said modified codeine 3-O-demethylase polypeptide is represented by the amino acid sequence set forth in SEQ ID NO: 58.

[0178] In a preferred embodiment of the invention said modified codeine 3-O-demethylase polypeptide is represented by the amino acid sequence set forth in SEQ ID NO: 59.

[0179] In a preferred embodiment of the invention said modified codeine 3-O-demethylase polypeptide is represented by the amino acid sequence set forth in SEQ ID NO: 60.

[0180] In a preferred embodiment of the invention said modified codeine 3-O-demethylase polypeptide is represented by the amino acid sequence set forth in SEQ ID NO: 61.

[0181] In a preferred embodiment of the invention said modified codeine 3-O-demethylase polypeptide is represented by the amino acid sequence set forth in SEQ ID NO: 62.

[0182] In a preferred embodiment of the invention said modified codeine 3-O-demethylase polypeptide is represented by the amino acid sequence set forth in SEQ ID NO: 65.

[0183] In a preferred embodiment of the invention said modified codeine 3-O-demethylase polypeptide is represented by the amino acid sequence set forth in SEQ ID NO: 64

[0184] In a preferred embodiment of the invention said modified codeine 3-O-demethylase polypeptide is represented by the amino acid sequence set forth in SEQ ID NO: 68.

[0185] In a preferred embodiment of the invention said modified codeine 3-O-demethylase polypeptide is represented by the amino acid sequence set forth in SEQ ID NO: 67.

[0186] In a preferred embodiment of the invention said modified codeine 3-O-demethylase polypeptide is represented by the amino acid sequence set forth in SEQ ID NO: 66.

[0187] In a preferred embodiment of the invention said modified codeine 3-O-demethylase polypeptide is represented by the amino acid sequence set forth in SEQ ID NO: 63.

[0188] According to a further aspect of the invention there is provided an isolated nucleic acid molecule comprising a nucleotide sequence encoding a modified codeine 3-O-demethylase polypeptide according to the invention.

[0189] In a preferred embodiment of the invention said nucleic acid molecule comprises a nucleotide sequence as set forth in SEQ ID NO: 2, 3, 4, 5, 6, 7, 8, 9, 10, 11, 12, 13, 14 or 15 or comprising a nucleotide sequence that is at least 90% identical to SEQ ID NO: 2, 3, 4, 5, 6, 7, 8, 9, 10, 11, 12, 13, 14 or 15 and encodes a polypeptide with modified codeine 3-O-demethylase activity.

[0190] In a preferred embodiment of the invention said nucleic acid molecule comprises a nucleotide sequence as set forth in SEQ ID NO: 38, 39, 40, 41, 42, 43, 44, 45, 46, 47, 48, 49, 50, 51 or 52 or comprising a nucleotide sequence that is at least 90% identical to SEQ ID NO: 38, 39, 40, 41, 42, 43, 44, 45, 46, 47, 48, 49, 50, 51 or 52 and encodes a polypeptide with modified codeine 3-O-demethylase activity.

[0191] In a preferred embodiment of the invention said nucleic acid molecule comprises a nucleotide sequence as set forth in SEQ ID NO: 1 wherein said sequence is modified wherein said modification is to a codon for amino acid residue 259 and/or 260.

[0192] In a preferred embodiment of the invention said nucleic acid molecule comprises a nucleotide sequence as set forth in SEQ ID NO: 37 wherein said sequence is modified wherein said modification is to a codon for amino acid residue 3, 4, 5, 7, 259, 357 and/or 360.

[0193] In a preferred embodiment of the invention said nucleic acid molecule comprises a nucleotide sequence encoding modified codeine 3-O-demethylase is set forth in SEQ ID NO: 3 or comprising a nucleotide sequence that is at least 90% identical to SEQ ID NO: 3 and includes a modification to a codon for amino acid residue 259 and optionally also 260.

[0194] In a preferred embodiment of the invention said nucleotide sequence encoding modified codeine 3-O-demethylase is set forth in SEQ ID NO: 8 or comprising a nucleotide sequence that is at least 90% identical to SEQ ID NO: 8 and includes a modification to a codon for amino acid residue 259 and optionally also 260.

[0195] In a preferred embodiment of the invention said nucleic acid molecule comprises a nucleotide sequence encoding modified codeine 3-O-demethylase is selected from the group consisting of SEQ ID NO: 2, 4, 5, 6, 7, 10, 12, 13, 14 and 15, or comprising a nucleotide sequence that is at least 90% identical to a sequence selected from the group consisting of SEQ ID NO: 2, 4, 5, 6, 7, 10, 12, 13, 14 and 15 and includes a modification to a codon for amino acid residue 259 and optionally also 260.

[0196] In a preferred embodiment of the invention said nucleic acid molecule comprises a nucleotide sequence encoding modified codeine 3-O-demethylase is selected from the group consisting of SEQ ID NO: 9 and 11 or comprising a nucleotide sequence that is at least 90% identical to a sequence selected from the group consisting of SEQ ID NO: 9 and 11 and includes a modification to a codon for amino acid residue 260 and optionally also 259.

[0197] In a preferred embodiment of the invention said nucleotide sequence encoding modified codeine 3-O-demethylase is selected from the group consisting of SEQ ID NO: 38, 39, 40, 41, 42, 43, 44, 45, 46, 47, 48, 49, 50, 51 and 52, or comprising a nucleotide sequence that is at least 90% identical to a sequence selected from the group consisting of SEQ ID NO: 38, 39, 40, 41, 42, 43, 44, 45, 46, 47, 48, 49, 50, 51 and 52 and includes a modification to a codon for the amino acid residues selected from the group consisting of 3, 4, 5, 7, 259, 357 and 360, and optionally combinations thereof selected from the group consisting of i) 357 and 360, ii) 5 and 360, iii) 5 and 259, iv) 259 and 360, v) 5, 259 and 360, vi) 4, 259 and 360, vii) 4, 5, 259 and 360, viii) 3, 4, 5 and 7, and ix) 3, 4, 5, 7, 357 and 360

[0198] In a preferred embodiment of the invention said nucleotide sequence encodes a modified codeine 3-O-demethylase polypeptide comprising an amino acid sequence as set forth in SEQ ID NO: 20, or a polypeptide comprising the amino acid sequence that is at least 90% identical to SEQ ID NO: 20 and includes the amino acid substitution E259K.

[0199] In a preferred embodiment of the invention said nucleotide sequence encodes a modified codeine 3-O-demethylase polypeptide comprising an amino acid sequence as set forth in SEQ ID NO: 21, or a polypeptide comprising the amino acid sequence that is at least 90% identical to SEQ ID NO: 21 and includes the amino acid substitution E259D.

[0200] In a preferred embodiment of the invention said nucleotide sequence encodes a modified codeine 3-O-demethylase polypeptide comprising an amino acid sequence as set forth in SEQ ID NO: 22 or a polypeptide comprising the amino acid sequence that is at least 90% identical to SEQ ID NO: 22 and includes the amino acid substitution E259H.

[0201] In a preferred embodiment of the invention said nucleotide sequence encodes a modified codeine 3-O-demethylase polypeptide comprising an amino acid sequence as set forth in SEQ ID NO: 23, or a polypeptide comprising the amino acid sequence that is at least 90% identical to SEQ ID NO: 23 and includes the amino acid substitution E259Q.

[0202] In a preferred embodiment of the invention said nucleotide sequence encodes a modified codeine 3-O-demethylase polypeptide comprising an amino acid sequence as set forth in SEQ ID NO: 24, or a polypeptide comprising the amino acid sequence that is at least 90% identical to SEQ ID NO: 24 and includes the amino acid substitution E259A.

[0203] In a preferred embodiment of the invention said nucleotide sequence encodes a modified codeine 3-O-demethylase polypeptide comprising an amino acid sequence as set forth in SEQ ID NO: 25, or a polypeptide comprising the amino acid sequence that is at least 90% identical to SEQ ID NO: 25 and includes the amino acid substitution E259S.

[0204] In a preferred embodiment of the invention said nucleotide sequence encodes a modified codeine 3-O-demethylase polypeptide comprising an amino acid sequence as set forth in SEQ ID NO: 26 or a polypeptide comprising the amino acid sequence that is at least 90% identical to SEQ ID NO: 26 and includes the amino acid substitution E259G.

[0205] In a preferred embodiment of the invention said nucleotide sequence encodes a modified codeine 3-O-demethylase polypeptide comprising an amino acid sequence as set forth in SEQ ID NO: 27 or a polypeptide comprising the amino acid sequence that is at least 90% identical to SEQ ID NO: 27 and includes the amino acid substitution R260T.

[0206] In a preferred embodiment of the invention said nucleotide sequence encodes a modified codeine 3-O-demethylase polypeptide comprising an amino acid sequence as set forth in SEQ ID NO: 28, or a polypeptide comprising the amino acid sequence that is at least 90% identical to SEQ ID NO: 28 and includes the amino acid substitution E259G and R260T.

[0207] In a preferred embodiment of the invention said nucleotide sequence encodes a modified codeine 3-O-demethylase polypeptide comprising an amino acid sequence as set forth in SEQ ID NO: 29 or a polypeptide comprising the amino acid sequence that is at least 90% identical to SEQ ID NO: 29 and includes the amino acid substitution R260K.

[0208] In a preferred embodiment of the invention said nucleotide sequence encodes a modified codeine 3-O-demethylase polypeptide comprising an amino acid sequence as set forth in SEQ ID NO: 30, or a polypeptide comprising the amino acid sequence that is at least 90% identical to SEQ ID NO: 30 and includes the amino acid substitution E259D and R260K.

[0209] In a preferred embodiment of the invention said nucleotide sequence encodes a modified codeine 3-O-demethylase polypeptide comprising an amino acid sequence as set forth in SEQ ID NO: 31 or a polypeptide comprising the amino acid sequence that is at least 90% identical to SEQ ID NO: 31 and includes the amino acid substitution E259G and R260K.

[0210] In a preferred embodiment of the invention said nucleotide sequence encodes a modified codeine 3-O-demethylase polypeptide comprising an amino acid sequence as set forth in SEQ ID NO: 54, or a polypeptide comprising the amino acid sequence that is at least 90% identical to SEQ ID NO: 54 and includes the amino acid substitution T3K, P4A, 15K and 17M.

[0211] In a preferred embodiment of the invention said nucleotide sequence encodes a modified codeine 3-O-demethylase polypeptide comprising an amino acid sequence as set forth in SEQ ID NO: 55 or a polypeptide comprising the amino acid sequence that is at least 90% identical to SEQ ID NO: 55 and includes the amino acid substitution Y357S and M360I.

[0212] In a preferred embodiment of the invention said nucleotide sequence encodes a modified codeine 3-O-demethylase polypeptide comprising an amino acid sequence as set forth in SEQ ID NO: 56, or a polypeptide comprising the amino acid sequence that is at least 90% identical to SEQ ID NO: 56 and includes the amino acid substitution T3K, P4A, 15K, 17M, Y357S and M360I.

[0213] In a preferred embodiment of the invention said nucleotide sequence encodes a modified codeine 3-O-demethylase polypeptide comprising an amino acid sequence as set forth in SEQ ID NO: 57 or a polypeptide comprising the amino acid sequence that is at least 90% identical to SEQ ID NO: 57 and includes the amino acid substitution T3K.

[0214] In a preferred embodiment of the invention said nucleotide sequence encodes a modified codeine 3-O-demethylase polypeptide comprising an amino acid sequence as set forth in SEQ ID NO: 58, or a polypeptide comprising the amino acid sequence that is at least 90% identical to SEQ ID NO: 58 and includes the amino acid substitution P4A.

[0215] In a preferred embodiment of the invention said nucleotide sequence encodes a modified codeine 3-O-demethylase polypeptide comprising an amino acid sequence as set forth in SEQ ID NO: 59 or a polypeptide comprising the amino acid sequence that is at least 90% identical to SEQ ID NO: 59 and includes the amino acid substitution 15K.

[0216] In a preferred embodiment of the invention said nucleotide sequence encodes a modified codeine 3-O-demethylase polypeptide comprising an amino acid sequence as set forth in SEQ ID NO: 60, or a polypeptide comprising the amino acid sequence that is at least 90% identical to SEQ ID NO: 60 and includes the amino acid substitution 17M.

[0217] In a preferred embodiment of the invention said nucleotide sequence encodes a modified codeine 3-O-demethylase polypeptide comprising an amino acid sequence as set forth in SEQ ID NO: 61 or a polypeptide comprising the amino acid sequence that is at least 90% identical to SEQ ID NO: 61 and includes the amino acid substitution Y357S.

[0218] In a preferred embodiment of the invention said nucleotide sequence encodes a modified codeine 3-O-demethylase polypeptide comprising an amino acid sequence as set forth in SEQ ID NO: 62, or a polypeptide comprising the amino acid sequence that is at least 90% identical to SEQ ID NO: 62 and includes the amino acid substitution M360I.

[0219] In a preferred embodiment of the invention said nucleotide sequence encodes a modified codeine 3-O-demethylase polypeptide comprising an amino acid sequence as set forth in SEQ ID NO: 63 or a polypeptide comprising the amino acid sequence that is at least 90% identical to SEQ ID NO: 63 and includes the amino acid substitution 15K and M360I.

[0220] In a preferred embodiment of the invention said nucleotide sequence encodes a modified codeine 3-O-demethylase polypeptide comprising an amino acid sequence as set forth in SEQ ID NO: 64, or a polypeptide comprising the amino acid sequence that is at least 90% identical to SEQ ID NO: 64 and includes the amino acid substitution 15K and E259G.

[0221] In a preferred embodiment of the invention said nucleotide sequence encodes a modified codeine 3-O-demethylase polypeptide comprising an amino acid sequence as set forth in SEQ ID NO: 65 or a polypeptide comprising the amino acid sequence that is at least 90% identical to SEQ ID NO: 65 and includes the amino acid substitution E259G and M360I.

[0222] In a preferred embodiment of the invention said nucleotide sequence encodes a modified codeine 3-O-demethylase polypeptide comprising an amino acid sequence as set forth in SEQ ID NO: 66, or a polypeptide comprising the amino acid sequence that is at least 90% identical to SEQ ID NO: 66 and includes the amino acid substitution 15K, E259G and M360I.

[0223] In a preferred embodiment of the invention said nucleotide sequence encodes a modified codeine 3-O-demethylase polypeptide comprising an amino acid sequence as set forth in SEQ ID NO: 67 or a polypeptide comprising the amino acid sequence that is at least 90% identical to SEQ ID NO: 67 and includes the amino acid substitution P4A, E259G and M360I.

[0224] In a preferred embodiment of the invention said nucleotide sequence encodes a modified codeine 3-O-demethylase polypeptide comprising an amino acid sequence as set forth in SEQ ID NO: 68, or a polypeptide comprising the amino acid sequence that is at least 90% identical to SEQ ID NO: 68 and includes the amino acid substitution P4A, 15K, E259G and M360I.

[0225] In a preferred embodiment of the invention said nucleic acid molecule comprises a nucleotide sequence wherein said nucleotide sequence is degenerate because of the genetic code and encodes a modified codeine 3-O-demethylase polypeptide according to the invention.

[0226] According to a further aspect of the invention there is provided an expression vector comprising a nucleic acid molecule according to the invention.

[0227] In a preferred embodiment of the invention said expression vector comprises a promoter operably linked to said nucleic acid molecule.

[0228] In a preferred embodiment of the invention said promoter is a constitutive promoter.

[0229] In an alternative preferred embodiment of the invention said promoter is regulatable.

[0230] Preferably, said promoter is inducible to provide induced expression of the operably linked nucleic acid.

[0231] Preferably said expression vector is adapted for expression in a microbial host cell.

[0232] According to an aspect of the invention there is provided a cell transformed with a nucleic acid molecule or vector according to the invention.

[0233] In a preferred embodiment of the invention said host cell is a eukaryotic cell.

[0234] In a preferred embodiment of the invention said eukaryotic cell is a plant cell, for example a Papaver species plant cell e.g., P. somniferum.

[0235] In a preferred embodiment of the invention said eukaryotic cell is a microbial cell, for example a Saccharomyces cerevisiae cell or Pichia pastoris cell.

[0236] In an alternative preferred embodiment of the invention said host cell is a prokaryotic cell.

[0237] In a further alternative preferred embodiment of the invention said prokaryotic cell is a bacterial cell, for example an Escherichia coli cell.

[0238] According to a further aspect of the invention there is provided a cell culture comprising a cell according to the invention.

[0239] According to a further aspect of the invention there is provided a fermenter comprising a cell culture according to the invention.

[0240] According to a further aspect of the invention there is provided a process for the biotransformation of at first opiate or opioid alkaloid to a second opiate or opioid alkaloid comprising:
[0241] forming a preparation comprising a modified codeine 3-O-demethylase polypeptide according to the invention and a crude poppy extract or a purified or semi-purified source of selected opiate or opioid alkaloid; and
[0242] incubating the preparation to allow transformation of one or more opiate or opioid alkaloids; and optionally
[0243] extracting said one or more transformed opiate or opioid alkaloids from said preparation.

[0244] In a preferred method of the invention said modified codeine 3-O-demethylase polypeptide is expressed by a cell according to the invention.

[0245] In a preferred method of the invention said first opiate alkaloid is a natural opiate alkaloid.

[0246] In an alternative method of the invention said first opiate alkaloid is a semi-synthetic opioid alkaloid.

[0247] In a preferred method of the invention said first opiate alkaloid is thebaine and said second opiate alkaloid is oripavine.

[0248] In an alternative preferred method of the invention said first opiate alkaloid is codeine and said second opiate alkaloid is morphine.

[0249] In a further alternative method of the invention said first opiate alkaloid is codeinone and said second opiate alkaloid is morphinone.

[0250] In a further alternative method of the invention said first semi-synthetic opioid alkaloid is oxycodone and said second semi-synthetic opioid alkaloid is oxymorphone.

[0251] In a further alternative method of the invention said first semi-synthetic opioid alkaloid is hydrocodone and said second semi-synthetic opioid alkaloid is hydromorphone.

[0252] In a further alternative method of the invention said first semi-synthetic opioid alkaloid is dihydrocodeine and said second semi-synthetic opioid alkaloid is dihydromorphine.

[0253] In a further alternative method of the invention said first semi-synthetic opioid alkaloid is 14-hydroxycodeine and said second semi-synthetic opioid alkaloid is 14-hydroxymorphine.

[0254] In a further alternative method of the invention said first semi-synthetic opioid alkaloid is noroxycodone and said second semi-synthetic opioid alkaloid is noroxymorphone.

[0255] In a further alternative method of the invention said first semi-synthetic opioid alkaloid is noroxycodeinone and said second semi-synthetic opioid alkaloid is noroxymorphinone.

[0256] In a further alternative method of the invention said first semi-synthetic opioid alkaloid is 14-hydroxy norcodeinone and said second semi-synthetic opioid alkaloid is 14-hydroxy normorphinone.

[0257] In a further alternative method of the invention said first semi-synthetic opioid alkaloid is 14-hydroxycodeinone and said second semi-synthetic opioid alkaloid is 14-hydroxymorphinone.

[0258] In a further alternative method of the invention said first semi-synthetic opioid alkaloid is buprenorphine intermediate (N-cyclopropylmethyl-7α-(2-hydroxy-3,3-dimethyl-2-butyl)-6,14-endoethano-6,7,8,14-tetrahydronorthebaine) and said second semi-synthetic opioid alkaloid is buprenorphine ((2S)-2-[17-(cyclopropylmethyl)-4,5α-epoxy-3-hydroxy-6-methoxy-6α,14-ethano-14α-morphinan-7α-γl]-3,3-dimethylbutan-2-ol).

[0259] In a further alternative method of the invention said first semi-synthetic opioid alkaloid is buprenorphine intermediate (7-acetyl-6,14-endoetheno-6,7,8,14-tetrahydrothebaine) and said second semi-synthetic opioid alkaloid is etorphine intermediate.

[0260] Further examples of semi-synthetic opiate alkaloids as disclosed in US2019/0144900 which is incorporated by reference in its entirety.

[0261] Throughout the description and claims of this specification, the words “comprise” and “contain” and variations of the words, for example “comprising” and “comprises”, means “includes”, “including but not limited to”, and is not intended to (and does not) exclude other moieties, additives, components, integers or steps. “Consisting essentially” means having the essential integers but including integers which do not materially affect the function of the essential integers.

[0262] Throughout the description and claims of this specification, the singular encompasses the plural unless the context otherwise requires. In particular, where the indefinite article is used, the specification is to be understood as contemplating plurality as well as singularity, unless the context requires otherwise.

[0263] Features, integers, characteristics, compounds, chemical moieties or groups described in conjunction with a particular aspect, embodiment or example of the invention are to be understood to be applicable to any other aspect, embodiment or example described herein unless incompatible therewith.

[0264] An embodiment of the invention will now be described by example only and with reference to the following figures and tables:

[0265] FIG. 1: Pathways for the conversion of thebaine to morphine in Papaver somniferum;

[0266] FIG. 2: A) Yield of oripavine and morphine produced by CODM mutants expressed relative to the yield obtained for wild type (WT) CODM. Biotransformations were conducted using strains expressing CODM mutants with varying amino acids at position 259 or WT CODM for 4 hours for oripavine or 30 minutes for morphine. The data are the mean±the standard deviation of three independent replicates. B) Representative SDS-PAGE image of WT CODM and CODM mutant expression. The values give expression relative to WT CODM determined by densiometric analysis, where the data is the mean±the standard deviation of three independent replicates;

[0267] FIG. 3A) Yield of oripavine and morphine produced by CODM mutants expressed relative to the yield obtained for wild type (WT) CODM. Biotransformations were conducted using strains expressing CODM mutants with varying amino acids at position 259, position 260 or both position 259 and 260 or WT CODM for 4 hours for oripavine or 30 minutes for morphine. The data are the mean±the standard deviation of three independent replicates. B) Representative SDS-PAGE image of WT CODM and CODM mutant expression. The values give expression relative to WT CODM determined by densiometric analysis, where the data is the mean±the standard deviation of three independent replicates; and

[0268] FIG. 4 Production of oripavine as a function of biotransformation progress using pure thebaine or thebaine crude extract as the substrate and cells expressing wild type CODM. Data are the mean±the standard deviation of two independent replicates.

[0269] FIG. 5. A) Yield of oripavine and morphine produced by CODM mutants expressed relative to the yield obtained for wild type (WT) CODM. Biotransformations were conducted using strains expressing CODM mutants with a single amino acid residue change (T3K, P4A, 15K, 17M, Y357S or M360I) or a mutation at multiple sites; 1) T3K+P4A+15K+17M, 2) Y357S+M360I, and 3) T3K+P4A+15K+17M+Y357S+M360I or WT CODM. Oripavine yield was assayed after 4 hours and morphine after 30 minutes. The data are the mean±the standard deviation of three independent replicates. B) Representative SDS-PAGE image of WT CODM and CODM mutant protein expression. The values give expression relative to WT CODM determined by densiometric analysis, where the data is the mean±the standard deviation of three independent replicates.

[0270] FIG. 6. A) Yield of oripavine and morphine produced by CODM mutants expressed relative to the yield obtained for wild type (WT) CODM. Biotransformations were conducted using strains expressing CODM mutants with combination of the P4A, 15K, E259G and M360I mutations or the 15K single mutation or WT CODM. Oripavine yield was assayed after 4 hours and morphine after 30 minutes. The data are the mean±the standard deviation of three independent replicates. B) Representative SDS-PAGE image of WT CODM and CODM mutant protein expression. The values give expression relative to WT CODM determined by densiometric analysis, where the data is the mean±the standard deviation of three independent replicates.

[0271] FIG. 7. A) Yield of oripavine produced as a function of time during biotransformation with cells expressing CODM with either the single 15K mutation, the single M360I mutation, the double 15K+M360I mutations or wild type (WT) CODM. Oripavine was assayed every hour for nine hours and then every three hours, until twenty-four hours had passed. B) Yield of morphine produced as a function of time during biotransformation with cells expressing CODM with either the single 15K mutation, the single M360I mutation, the double 15K+M360I mutations or wild type (WT) CODM. Morphine was assayed every fifteen minutes until two hours had passed. The data are the mean±the standard deviation of three independent replicates.

### MATERIALS AND METHODS

### Chemicals and Reagents

[0272] Antibiotics, analytical grade glycerol, Isopropyl β-D-1-thiogalactopyranoside (IPTG), sodium chloride, sodium ascorbate, glucose, and iron sulfate heptahydrate, HPLC grade acetonitrile, methanol, trifluoracetic acid (TFA), dichloromethane (DCM) and acetic acid were purchased from Merck (USA). Restriction enzymes, Phusion High Fidelity DNA Polymerase, NEBuilder HiFi DNA Assembly, E. coli 5-alpha competent cells and E. coli BL21 (DE3) competent cells (an E. coli B strain derivative) were purchased from New England BioLabs Inc., USA. Yeast extract and tryptone for medium preparation were purchased from Oxiod, Thermo Scientific, UK. Water for all the experiments was purified to a resistivity of ≥18.2 MΩ·cm. Thebaine, oripavine, codeine and morphine were provided by Sun Pharmaceutical Industries Australia Pty Ltd.

### Plasmids and Stains

[0273] Plasmids used in this study are listed in Table 1, primers and synthetic sequences are listed in Table 2 and 3. Synthetic gBlock sequences were codon optimized for expression in E. coli B strains and ordered from Integrated DNA Technologies (IDT, USA). Sufficient vector homology (˜20 bp) for assembly by NEBuilder HiFi DNA Assembly was designed into the gBlocks to speed up construct creation. The T7 polymerase expression vector pET24b-6H-MBP (Merck, USA) was used to control expression of the genes of interest. Each open reading frame (ORF) was N-terminally fused to a six-histidine tag (6H) and a maltose binding protein (MBP). In addition, the ORFs were under the transcriptional control of the T7 promoter and the T7 terminator. E. coli 5-alpha competent cells were used for plasmid cloning and maintenance, while E. coli BL21 (DE3) competent cells were used for biotransformation and protein expression. Assembled constructs were verified by sequencing (Australian Genome Research Facility, Australia) using primers UM13/UM03 (see Table 2).

[0274] The CODM (UniProtKB: D4N502) (referred to here as WT CODM for ease of comparison) expression plasmid employing E. coli codon usage, pGWKS100, was created by assembling the 1.1 kb CODM gBlock (UMg4) into the BamHI- and XhoI-linearized pET24b-6H-MBP backbone using NEBuilder.

[0275] Several of the expression vectors (pGWKS101, 119-126, see Table 1) were created using the same procedure; the wild type residue was replaced with the appropriate residue by PCR amplification (see Table 2) and then cloned into the linearized pET24b-6H-MBP expression vector using NEBuilder. For example, to construct the expression vector, pGWKS101, of the endogenous CODM E259K variant (NCBI Reference Sequence: XP_026416234.1) the glutamic acid (E) residue present within the CODM WT isoform was replaced with a lysine (K) residue by PCR amplification (UM15/UM05 and UM06/UM18) and the two fragments assembled into linearized pET24b-6H-MBP via NEBuilder.

[0276] The remaining expression vectors (pGWSK127-129, 131-146) (see Table 1) were created by assembling the respective 1.1 kb ORF gBlocks (UMg8-26) (see Table 3) into the linearized pET24b-6H-MBP backbone using NEBuilder.

### Cell Culture and Protein Expression

[0277] Cells were cultured overnight at 37° C. in Lysogeny Broth medium (0.5% yeast extract, 1% tryptone and 1% NaCl) supplemented with kanamycin (50 μg/mL). 1 mL of the overnight cell culture was inoculated into conical flask that contained 50 mL 2-YT medium (1% yeast extract, 1.6% tryptone and 0.5% NaCl), supplemented with kanamycin (50 μg/mL) and 1 mL glycerol. Protein expression was induced by IPTG addition (0.1 mM) when OD600 (optical density measured at 600 nm) reached 0.4-0.8 and continued for 22 hours at 18° C. Following protein expression cells pellets were collected, by centrifugation at 3,000 g for 15 minutes, and resuspended in 15% glycerol to an OD600 of 100 for biotransformation.

### Whole Cell Biotransformation

[0278] Biotransformations were conducted in 20 mL volumes and consisted of the indicated alkaloid (1 mM thebaine, 1 mM codeine or thebaine crude poppy extract), 100 mM phosphate buffer (pH 6.0), 0.5% w/w glucose, 10 UM iron (II) sulfate (FeSO₄) and 10 mM sodium ascorbate and E. coli cells of OD600 of 10. The reaction was conducted at 24° C. with shaking at 220 rpm. Samples were taken regularly at different time intervals. Samples collected were centrifuged, at 16,000 g for 7 minutes, and the supernatant was analyzed by liquid chromatography-mass spectrometer for alkaloid quantification. Three independent replicates were conducted for CODM mutant biotransformations and two for thebaine crude extract biotransformations.

### Protein Expression Analysis

[0279] The soluble protein produced by protein expression was determined by SDS-PAGE analysis using the BugBuster™ protocol provided by the manufacturer. Briefly, the soluble protein fraction was liberated from frozen cell pellets, where the OD600 was 1, by resuspension in BugBuster™ protein extraction reagent containing Benzonase (25 units/mL of BugBuster™ reagent) (Merck, Germany). The insoluble cell debris and soluble protein containing supernatant were then separated by centrifugation at 16,000 g for 20 minutes and 4° C. The soluble protein fractions were run on a pre-cast Bolt 8% Bis-Tris Plus Gels (ThermoFisher Scientific, USA) in MOPS running buffer at 120 V for 60 minutes. Protein size was estimated using the Precision Plus Protein™ Kaleidoscope™ Prestained Protein Standard (Bio-Rad Laboratories, USA). Band intensity (less background intensity and normalized to the 75 kDa molecular weight band) was calculated using the Image Lab software (Bio-Rad Laboratories, USA). Soluble protein expression was determined for each of the CODM mutant assays independent replicates.

### Preparation of Crude Poppy Extract

[0280] The optimization of extraction methods can be found in the textbook “Natural Product Extraction, Principles and Applications” (Edited by M Rostagno and J Prado, RSC Publishing (2013), ISBN 978 1 84973 606 0). Extracts are prepared as would be by those familiar in the art of natural product extraction where the extraction may contain aqueous and/or hydrocarbon based liquid systems, at temperatures between 0° C. and 100° C., adjusted for pH (between pH 2 and pH 14) using appropriate acidic or alkaline reagents.

### LC-MS Analysis of Alkaloids

[0281] Quantification of alkaloids was performed using a Shimadzu LCMS-2020 liquid chromatograph mass spectrometer. Analysis was carried out on an Onyx Monolithic C18 column (100×4.6 mm, Phenomenex Australia Pty Ltd), with a linear gradient of 0-20% buffer B and at a flow rate increased from 1 mL/min to 2.5 mL/min over 10 min at 28° C. [buffer A: 0.1% TFA in water; buffer B: 0.1% TFA in acetonitrile]. The detector wavelength was set at 285 nm with the reference wavelength set at 360 nm. Alkaloid compounds in biotransformation samples were identified by comparing to alkaloid standards, referring to both retention time [morphine at 4.3 min, codeine at 6.9 min, oripavine at 7.5 min and thebaine at 10.1 min] and mass to charge ratio (m/z) [morphine 286, codeine 300, oripavine 298 and thebaine 312]. Shimadzu LabSolutions software was used to integrate the peak area for each compound to quantify the concentration of alkaloid in each sample, by referring to the peak area of alkaloid standard series with concentrations ranging from 25 μg/mL to 500 μg/mL. Samples were injected into the LC-MS with a 5 μL injection volume for analysis.

### Example 1

[0282] The suitability of thebaine crude poppy extract as a biotransformation substrate, relative to pure thebaine, was assessed over the course of 24 hours. Two concentrations of thebaine crude extract, equivalent to 0.2 g/L thebaine and 0.5 g/L thebaine, were assayed. Crude extract was added to the reaction mixture in place of pure thebaine and all other components were kept constant. As can be seen in FIG. 4 thebaine crude extract can replace pure thebaine with minimal variation to reaction progression. Moreover, several concentrations of thebaine crude extract can be employed as a biotransformation substrate, producing higher concentrations of oripavine.

### Example 2

[0283] Seven strains were generated containing mutations at the 259^{th} amino acid residue (E259K, -D, -H, -Q, -A, -S and -G) of CODM and two strains were generated that contained mutations at the 260^{th} residue (R260T and -K) of CODM. Three double mutant strains were created containing mutations to both the 259^{th} and 260^{th} residues of CODM (E259G+R260T, E259D+R260K and E259G+R260K). The performance of the CODM mutant strains was assessed via biotransformation with morphine yield assayed after 30 minutes and oripavine yield assayed after 4 hours, as shown in FIG. 2-3. Soluble protein expression under these conditions was assayed via SDS-PAGE analysis, as shown in FIG. 2-3.

[0284] Of the seven 259 residue mutant strains investigated, only the E259D and E259G mutants demonstrated an improvement in product yield, with morphine yield improved by ˜30% and ˜24% respectively and oripavine yield by ˜38% and ˜27% respectively relative to the wild type (WT) CODM. Moreover, these mutations appeared to improve the amount of soluble protein expressed with ˜2.1× more soluble E259D and ˜1.5× more soluble E259G produced compared to WT CODM. In comparison, biotransformation with E259K, -H, -Q, -A and -S CODM mutants lead to a reduction in product yield by at least 20% relative to WT CODM, coincident with a reduction in the expression of soluble protein expression, as shown in FIG. 2-3.

[0285] The R260T expressing strain generated ˜28% less morphine and ˜29% less oripavine than WT CODM and expressed ˜63% less soluble protein, see FIG. 3. In comparison, the R260K expressing strain produced similar levels of both products to WT CODM, with a similar amount of soluble protein produced to the WT CODM strain, see FIG. 3.

[0286] Incorporation of the E259G mutation rescued the performance of the R260T mutation in the E259G+R260T double mutant strain, generating a similar level of conversion to the WT CODM strain (FIG. 3). In comparison, the performance of the E259D+R260K, and E259G+R260K double mutant strains was improved compared to the WT CODM stain and had a performance and level of protein expression comparable to the E259D and E259G single mutant strains (FIG. 3).

### Example 3

[0287] Six strains were generated containing a single amino acid mutation at either the 3^{rd}, 4^{th}, 5^{th}, 7^{th}, 357^{th} or 360^{th} residue of WT CODM: T3K, P4A, 15K, 17M, Y357S or M360I. Three additional strains were generated with the following combinations of mutations: 1) T3K+P4A+15K+17M, 2) Y357S+M360I, and 3) T3K+P4A+15K+17M+Y357S+M360I. The performance of the CODM mutant strains was assessed via biotransformation with morphine yield assayed after 30 minutes and oripavine yield assayed after 4 hours, as shown in FIG. 5A. Soluble protein expression under these conditions was assayed via SDS-PAGE analysis, as shown in FIG. 5B.

[0288] Of the six single mutant strains investigated, both the 15K strain and the M360I strain demonstrated an improvement in product yield, with morphine yield improved by ˜58% and ˜ 29% respectively and oripavine yield by ˜79% and ˜33% respectively, compared to the WT CODM strain (FIG. 5A). The 15K mutation appeared to improve the amount of soluble protein expressed, with ˜2.9× greater than WT CODM but only small changes in protein expression were observed in the M360I strain compared to WT CODM (FIG. 5B).

[0289] The four other single mutant strains (T3K, P4A, 17M or Y357S) led to either a minor improvement in product yield (e.g., T3K or P4A) or a reduction in product yield by at least ˜22% (e.g. 17M or Y357S) relative to the WT CODM strain. This coincided with little change (e.g. T3K, P4A, Y357S or 17M) in the level of protein expression (FIG. 5B).

[0290] All three strains containing the combined mutants had a lower biotransformation yield for at least one of the two desired products relative to the WT CODM strain. This coincided with an increase in the level of protein expression for all three strains, which was most notable for the T3K+P4A+15K+17K strain (˜3.2×) and the T3K+P4A+15K+17M+Y357S+M360I strain (˜4×).

### Example 4

[0291] Six additional strains were generated containing various combinations of the P4A, 15K, E259G and M360 mutations to assess the impact of these beneficial mutations on the yield and level of soluble protein expression for the modified CODM enzymes. In this case, morphine production was measured after 15 minutes (compared to 30 minutes in Example 3) and oripavine after 2 hours (compared to 4 hours in Example 3) as shown in FIG. 6A. This was due to an accelerated reaction rate for these mutants.

[0292] All six strains demonstrated an improvement in yield for both morphine and oripavine production by biotransformation and the level of soluble protein expression detected relative to WT CODM (FIGS. 6A and B). The strain containing both the 15K+M360I mutations produced the highest yield of all the mutant strains, with a 2.3× increase in morphine yield and 2.76× increase in oripavine yield relative to the WT CODM strain (FIG. 6A), with ˜5.5× more soluble protein compared to WT CODM (FIG. 6B).

### Example 5

[0293] The performance of the strains containing the single mutations 15K or M360I or the double mutations 15K+M360I was compared to the WT CODM over the time course of the entire thebaine or codeine demethylation reaction. Oripavine was assayed every hour for the first nine hours and then every three hours until twenty-four hours had passed. The quicker codeine demethylation reaction was assessed by measuring morphine every fifteen minutes over two hours.

[0294] The strain containing the 15K+M360I double mutation performed the fastest biotransformation, with thebaine as a substrate, achieving a yield of thebaine to oripavine of ˜95% after ˜five hours (FIG. 7A). The strains with single mutations also performed faster than the strain with WT CODM. The bioconversion reaction neared complete conversion for all three mutant strains at least twelve hours before that of the WT CODM strain.

[0295] Two strains displayed a similar fast biotransformation rate with codeine as the substrate; these contained the single mutation 15K or the double mutation 15K+M360I, which achieved a yield of morphine of ˜ 94% after one hour, which was faster than the WT CODM control (FIG. 7B). The single mutant M360I was faster than the WT CODM control but not as fast as the other two mutant strains. All three mutants achieved near complete conversion by two hours.

TABLE 1
Plasmids used in this study
All strains were made in pET24b-6H-MBP

| Plasmid | Genotype | Source |
|---|---|---|
| pET24b-6H- | T7 expression vector | Merck |
| MBP | | |
| pGWKS100 | CODM WT cassette in pET24b-6H-MBP | This study |
| pGWKS101 | E259K cassette in pET24b-6H-MBP | This study |
| pGWKS119 | CODM E259D in pET24b-6H-MBP | This study |
| pGWKS120 | CODM E259H in pET24b-6H-MBP | This study |
| pGWKS121 | CODM E259Q in pET24b-6H-MBP | This study |
| pGWKS122 | CODM E259A in pET24b-6H-MBP | This study |
| pGWKS123 | CODM E259S in pET24b-6H-MBP | This study |
| pGWKS124 | CODM E259G in pET24b-6H-MBP | This study |
| pGWKS125 | CODM R260T in pET24b-6H-MBP | This study |
| pGWSK126 | CODM E259G + R260T in pET24b-6H-MBP | This study |
| pGWKS131 | CODM R260K in pET24b-6H-MBP | This study |
| pGWKS132 | CODM E259D + R260K in pET24b-6H-MBP | This study |
| PGWKS133 | CODM E259G + R260K in pET24b-6H-MBP | This study |
| pGWKS134 | CODM WT* cassette in pET24b-6H-MBP | This study |
| pGWKS127 | CODM T3K + P4A + I5K + I7M in pET24b-6H-MBP | This study |
| pGWKS128 | CODM Y357S + M360I in pET24b-6H-MBP | This study |
| pGWKS129 | CODM T3K + P4A + I5K + I7M + Y357S + M360I | This study |
| | in pET24b-6H-MBP | |
| pGWKS135 | CODM T3K in pET24b-6H-MBP | This study |
| pGWKS136 | CODM P4A in pET24b-6H-MBP | This study |
| pGWKS137 | CODM I5K in pET24b-6H-MBP | This study |
| pGWKS138 | CODM I7M in pET24b-6H-MBP | This study |
| pGWKS139 | CODM Y357S in pET24b-6H-MBP | This study |
| pGWSK140 | CODM M360I in pET24b-6H-MBP | This study |
| pGWKS141 | CODM I5K + M360I in pET24b-6H-MBP | This study |
| pGWKS142 | CODM I5K + E259G in pET24b-6H-MBP | This study |
| pGWKS143 | CODM E259G + M360I in pET24b-6H-MBP | This study |
| pGWKS144 | CODM I5K + E259G + M360I in pET24b-6H-MBP | This study |
| pGWKS145 | CODM P4A + E259G + M360I in pET24b-6H-MBP | This study |
| pGWKS146 | CODM P4A + I5K + E259G + M360I in pET24b-6H- | This study |
| | MBP | |

[0296] pGWKS134 encodes an identical protein to the WT CODM enzyme within the pGWKS100 plasmid, differing only in the codons used at the 2^{nd} (GAG→GAA), 6^{th} (TTG→CTG) and 118^{th} (CGC→CGT) codon. pGWKS127-129 and pGWKS135-145 contain the equivalent codon usage to pGWKS134 and the pGWKS134 strain was used as the control WT CODM in these assays. This control was used for experiments described in Examples 4-6 but not Examples 1-3, which used pGWKS100 strain as the control WT CODM.

TABLE 2
Primers used in this study

| | | | SEQ |
|---|---|---|---|
| Primer | | | ID |
| ID | Name | Sequence | NO: |
| UM13 | Sequencing | GAAATCATGCCGAACATCCC | 69 |
| | upper | | |
| UM03 | Sequencing | CCGGATATAGTTCCTCCTTTCAGC | 70 |
| | lower | | |
| UM05 | CODM E259K | TCCACCGTTTTTCCTTCCGAAT | 71 |
| | fragment 1 | | |
| | lower | | |
| UM06 | CODM E259K | GATTCGGAAGGAAAAACGGTGGAT | 72 |
| | fragment 2 | C | |
| | upper | | |
| UM15 | CODM E2594 | CGGTCGTCAGACTGTCGATGA | 73 |
| | fragment 1 | | |
| | upper | | |
| UM18 | CODM E2594 | TTAGCAGCCGGATCTCAGTG | 74 |
| | fragment 2 | | |
| | lower | | |
| UM19 | CODM E259D | TCCACCGGTCTTCCTTCCGAAT | 75 |
| | fragment 1 | | |
| | lower | | |
| UM20 | CODM E259D | GATTCGGAAGGAAGACCGGTGGAT | 76 |
| | fragment 2 | C | |
| | upper | | |
| UM21 | CODM E259H | TCCACCGATGTTCCTTCCGAAT | 77 |
| | fragment 1 | | |
| | lower | | |
| UM22 | CODM E259H | GATTCGGAAGGAACATCGGTGGAT | 78 |
| | fragment 2 | C | |
| | upper | | |
| UM23 | CODM E259Q | TCCACCGTTGTTCCTTCCGAAT | 79 |
| | fragment 1 | | |
| | lower | | |
| UM24 | CODM E259Q | GATTCGGAAGGAACAACGGTGGAT | 80 |
| | fragment 2 | C | |
| | upper | | |
| UM25 | CODM E259A | TCCACCGTGCTTCCTTCCGAAT | 81 |
| | fragment 1 | | |
| | lower | | |
| UM26 | CODM E259A | GATTCGGAAGGAAGCACGGTGGAT | 82 |
| | fragment 2 | C | |
| | upper | | |
| UM27 | CODM E259S | TCCACCGACTTTCCTTCCGAAT | 83 |
| | fragment 1 | | |
| | lower | | |
| UM28 | CODM E259S | GATTCGGAAGGAAAGTCGGTGGAT | 84 |
| | fragment 2 | C | |
| | upper | | |
| UM32 | CODM E259G | TCCACCGACCTTCCTTCCGAAT | 85 |
| | fragment 1 | | |
| | lower | | |
| UM33 | CODM E259G | GATTCGGAAGGAAGGTCGGTGGAT | 86 |
| | fragment 2 | C | |
| | upper | | |
| UM34 | CODM R260T | TCCACGTCTCTTCCTTCCGAAT | 87 |
| | fragment 1 | | |
| | lower | | |
| UM35 | CODM R260T | GATTCGGAAGGAAGAGACGTGGAT | 88 |
| | fragment 2 | C | |
| | upper | | |
| UM36 | CODM E259G + | TCCACGTACCTTCCTTCCGAAT | 89 |
| | R260T | | |
| | fragment 1 | | |
| | lower | | |
| UM37 | CODM E259G + | GATTCGGAAGGAAGGTACGTGGAT | 90 |
| | R260T | C | |
| | fragment 2 | | |
| | upper | | |

[0297] The “Δ” primers are generic and thus were used as the upper primer (UM15) and lower primer (UM18) for all fragment 1 and 2 amplification, respectively.

[0298] The R260K, E259D+R260K and E259G+R260K expression plasmids were created using synthetic sequences rather than via PCR mutagenesis. See materials & methods section.

TABLE 3
Open Reading Frames and Synthetic Sequences

Synthetic sequences used for cloning are denoted by UMgX,
were ordered from IDT and codon optimized for expression in
E. coli B strains. Homology regions
CCTGAAAGACGCGCAGACTGGATCC (SEQ ID NO: 91) and
CTCGAGCACCACCACCACCACCACTGAGATCCGGCTGCTA (SEQ ID NO: 92)
and other similar sequences were included upstream and
downstream, respectively, of each synthetic sequences to
facilitate NEBuilder assembly and are optional in relation to
nucleic acid molecules encoding proteins according to the invention.

| Name | Sequence |
|---|---|
| CODM WT | CCTGAAAGACGCGCAGACTGGATCCATGGAGACCCCAATCTTGATC |
| (UMg4) | AAACTTGGCAACGGGCTCTCGATCCCTAGCGTCCAAGAGCTCGCCA |
| SEQ ID | AGTTGACCCTGGCCGAGATCCCAAGTCGGTATACATGCACAGGTGA |
| NO: 1 | GAGCCCACTTAACAACATCGGTGCGTCAGTAACAGACGATGAAACG |
| | GTGCCGGTCATTGATTTGCAAAACTTATTAAGTCCAGAGCCAGTAGT |
| | GGGGAAATTAGAGTTGGACAAGTTACACTCCGCTTGCAAAGAGTGG |
| | GGCTTCTTTCAGCTTGTCAACCATGGCGTTGATGCCTTGTTAATGGA |
| | CAACATTAAGAGCGAAATCAAGGGCTTTTTTAACCTGCCGATGAATG |
| | AGAAGACCAAATACGGTCAGCAGGACGGCGACTTTGAAGGGTTCG |
| | GTCAGCCTTATATTGAATCTGAGGATCAGCGCTTGGATTGGACTGA |
| | GGTGTTCTCAATGCTCTCGCTGCCACTTCACCTGCGCAAGCCGCAC |
| | CTTTTTCCAGAACTTCCACTTCCGTTTCGCGAGACCCTGGAGTCGTA |
| | CTTGAGCAAGATGAAAAAACTGTCAACGGTGGTGTTTGAGATGTTA |
| | GAAAAGAGTTTGCAACTTGTTGAGATTAAAGGTATGACTGACTTGTT |
| | CGAAGACGGGCTCCAAACGATGCGCATGAATTACTATCCTCCATGT |
| | CCACGGCCTGAGTTGGTATTGGGTCTTACAAGTCATAGTGACTTTTC |
| | TGGGTTGACCATTTTACTCCAGTTAAACGAAGTGGAGGGGTTGCAG |
| | ATTCGGAAGGAAGAGCGGTGGATCAGCATCAAACCGCTTCCAGAC |
| | GCCTTTATTGTCAACGTAGGTGATATTCTCGAAATTATGACCAACGG |
| | GATCTATCGTAGTGTTGAGCACCGTGCAGTCGTGAATAGTACCAAG |
| | GAGCGGCTTTCCATCGCCACATTCCATGACTCTAAATTGGAATCCG |
| | AAATCGGTCCTATCTCTTCGTTGGTTACTCCTGAGACCCCTGCATTA |
| | TTCAAGCGCGGGCGCTACGAAGACATTCTCAAGGAAAACCTTTCGC |
| | GCAAACTTGATGGCAAGTCTTTCCTGGATTACATGCGCATGTGACT |
| | CGAGCACCACCACCACCACCACTGAGATCCGGCTGCTA |
| CODM | ATGGAGACCCCAATCTTGATCAAACTTGGCAACGGGCTCTCGATCC |
| E259K | CTAGCGTCCAAGAGCTCGCCAAGTTGACCCTGGCCGAGATCCCAA |
| SEQ ID | GTCGGTATACATGCACAGGTGAGAGCCCACTTAACAACATCGGTGC |
| NO: 2 | GTCAGTAACAGACGATGAAACGGTGCCGGTCATTGATTTGCAAAAC |
| | TTATTAAGTCCAGAGCCAGTAGTGGGGAAATTAGAGTTGGACAAGT |
| | TACACTCCGCTTGCAAAGAGTGGGGCTTCTTTCAGCTTGTCAACCA |
| | TGGCGTTGATGCCTTGTTAATGGACAACATTAAGAGCGAAATCAAG |
| | GGCTTTTTTAACCTGCCGATGAATGAGAAGACCAAATACGGTCAGC |
| | AGGACGGCGACTTTGAAGGGTTCGGTCAGCCTTATATTGAATCTGA |
| | GGATCAGCGCTTGGATTGGACTGAGGTGTTCTCAATGCTCTCGCTG |
| | CCACTTCACCTGCGCAAGCCGCACCTTTTTCCAGAACTTCCACTTC |
| | CGTTTCGCGAGACCCTGGAGTCGTACTTGAGCAAGATGAAAAAACT |
| | GTCAACGGTGGTGTTTGAGATGTTAGAAAAGAGTTTGCAACTTGTTG |
| | AGATTAAAGGTATGACTGACTTGTTCGAAGACGGGCTCCAAACGAT |
| | GCGCATGAATTACTATCCTCCATGTCCACGGCCTGAGTTGGTATTG |
| | GGTCTTACAAGTCATAGTGACTTTTCTGGGTTGACCATTTTACTCCA |
| | GTTAAACGAAGTGGAGGGGTTGCAGATTCGGAAGGAAAAACGGTG |
| | GATCAGCATCAAACCGCTTCCAGACGCCTTTATTGTCAACGTAGGT |
| | GATATTCTCGAAATTATGACCAACGGGATCTATCGTAGTGTTGAGCA |
| | CCGTGCAGTCGTGAATAGTACCAAGGAGCGGCTTTCCATCGCCACA |
| | GGTTACTCCTGAGACCCCTGCATTATTCAAGCGCGGGCGCTACGAA |
| | GACATTCTCAAGGAAAACCTTTCGCGCAAACTTGATGGCAAGTCTTT |
| | CCTGGATTACATGCGCATGTGA |
| CODM | ATGGAGACCCCAATCTTGATCAAACTTGGCAACGGGCTCTCGATCC |
| E259D | CTAGCGTCCAAGAGCTCGCCAAGTTGACCCTGGCCGAGATCCCAA |
| SEQ ID | GTCGGTATACATGCACAGGTGAGAGCCCACTTAACAACATCGGTGC |
| NO: 3 | GTCAGTAACAGACGATGAAACGGTGCCGGTCATTGATTTGCAAAAC |
| | TTATTAAGTCCAGAGCCAGTAGTGGGGAAATTAGAGTTGGACAAGT |
| | TACACTCCGCTTGCAAAGAGTGGGGCTTCTTTCAGCTTGTCAACCA |
| | TGGCGTTGATGCCTTGTTAATGGACAACATTAAGAGCGAAATCAAG |
| | GGCTTTTTTAACCTGCCGATGAATGAGAAGACCAAATACGGTCAGC |
| | AGGACGGCGACTTTGAAGGGTTCGGTCAGCCTTATATTGAATCTGA |
| | GGATCAGCGCTTGGATTGGACTGAGGTGTTCTCAATGCTCTCGCTG |
| | CCACTTCACCTGCGCAAGCCGCACCTTTTTCCAGAACTTCCACTTC |
| | CGTTTCGCGAGACCCTGGAGTCGTACTTGAGCAAGATGAAAAAACT |
| | GTCAACGGTGGTGTTTGAGATGTTAGAAAAGAGTTTGCAACTTGTTG |
| | AGATTAAAGGTATGACTGACTTGTTCGAAGACGGGCTCCAAACGAT |
| | GCGCATGAATTACTATCCTCCATGTCCACGGCCTGAGTTGGTATTG |
| | GGTCTTACAAGTCATAGTGACTTTTCTGGGTTGACCATTTTACTCCA |
| | GTTAAACGAAGTGGAGGGGTTGCAGATTCGGAAGGAAGACCGGTG |
| | GATCAGCATCAAACCGCTTCCAGACGCCTTTATTGTCAACGTAGGT |
| | GATATTCTCGAAATTATGACCAACGGGATCTATCGTAGTGTTGAGCA |
| | CCGTGCAGTCGTGAATAGTACCAAGGAGCGGCTTTCCATCGCCACA |
| | TTCCATGACTCTAAATTGGAATCCGAAATCGGTCCTATCTCTTCGTT |
| | GGTTACTCCTGAGACCCCTGCATTATTCAAGCGCGGGCGCTACGAA |
| | GACATTCTCAAGGAAAACCTTTCGCGCAAACTTGATGGCAAGTCTTT |
| | CCTGGATTACATGCGCATGTGA |
| CODM | ATGGAGACCCCAATCTTGATCAAACTTGGCAACGGGCTCTCGATCC |
| E259H | CTAGCGTCCAAGAGCTCGCCAAGTTGACCCTGGCCGAGATCCCAA |
| SEQ ID | GTCGGTATACATGCACAGGTGAGAGCCCACTTAACAACATCGGTGC |
| NO: 4 | GTCAGTAACAGACGATGAAACGGTGCCGGTCATTGATTTGCAAAAC |
| | TTATTAAGTCCAGAGCCAGTAGTGGGGAAATTAGAGTTGGACAAGT |
| | TACACTCCGCTTGCAAAGAGTGGGGCTTCTTTCAGCTTGTCAACCA |
| | TGGCGTTGATGCCTTGTTAATGGACAACATTAAGAGCGAAATCAAG |
| | GGCTTTTTTAACCTGCCGATGAATGAGAAGACCAAATACGGTCAGC |
| | AGGACGGCGACTTTGAAGGGTTCGGTCAGCCTTATATTGAATCTGA |
| | GGATCAGCGCTTGGATTGGACTGAGGTGTTCTCAATGCTCTCGCTG |
| | CCACTTCACCTGCGCAAGCCGCACCTTTTTCCAGAACTTCCACTTC |
| | CGTTTCGCGAGACCCTGGAGTCGTACTTGAGCAAGATGAAAAAACT |
| | GTCAACGGTGGTGTTTGAGATGTTAGAAAAGAGTTTGCAACTTGTTG |
| | AGATTAAAGGTATGACTGACTTGTTCGAAGACGGGCTCCAAACGAT |
| | GCGCATGAATTACTATCCTCCATGTCCACGGCCTGAGTTGGTATTG |
| | GGTCTTACAAGTCATAGTGACTTTTCTGGGTTGACCATTTTACTCCA |
| | GTTAAACGAAGTGGAGGGGTTGCAGATTCGGAAGGAACATCGGTG |
| | GATCAGCATCAAACCGCTTCCAGACGCCTTTATTGTCAACGTAGGT |
| | GATATTCTCGAAATTATGACCAACGGGATCTATCGTAGTGTTGAGCA |
| | CCGTGCAGTCGTGAATAGTACCAAGGAGCGGCTTTCCATCGCCACA |
| | TTCCATGACTCTAAATTGGAATCCGAAATCGGTCCTATCTCTTCGTT |
| | GGTTACTCCTGAGACCCCTGCATTATTCAAGCGCGGGCGCTACGAA |
| | GACATTCTCAAGGAAAACCTTTCGCGCAAACTTGATGGCAAGTCTTT |
| | CCTGGATTACATGCGCATGTGA |
| CODM | ATGGAGACCCCAATCTTGATCAAACTTGGCAACGGGCTCTCGATCCCTAGC |
| E259Q | GTCCAAGAGCTCGCCAAGTTGACCCTGGCCGAGATCCCAAGTCGGTATAC |
| SEQ ID | ATGCACAGGTGAGAGCCCACTTAACAACATCGGTGCGTCAGTAACAGACG |
| NO: 5 | ATGAAACGGTGCCGGTCATTGATTTGCAAAACTTATTAAGTCCAGAGCCAG |
| | TAGTGGGGAAATTAGAGTTGGACAAGTTACACTCCGCTTGCAAAGAGTGG |
| | GGCTTCTTTCAGCTTGTCAACCATGGCGTTGATGCCTTGTTAATGGACAAC |
| | ATTAAGAGCGAAATCAAGGGCTTTTTTAACCTGCCGATGAATGAGAAGACC |
| | AAATACGGTCAGCAGGACGGCGACTTTGAAGGGTTCGGTCAGCCTTATATT |
| | GAATCTGAGGATCAGCGCTTGGATTGGACTGAGGTGTTCTCAATGCTCTCG |
| | CTGCCACTTCACCTGCGCAAGCCGCACCTTTTTCCAGAACTTCCACTTCCG |
| | TTTCGCGAGACCCTGGAGTCGTACTTGAGCAAGATGAAAAAACTGTCAACG |
| | GTGGTGTTTGAGATGTTAGAAAAGAGTTTGCAACTTGTTGAGATTAAAGGTA |
| | TGACTGACTTGTTCGAAGACGGGCTCCAAACGATGCGCATGAATTACTATC |
| | CTCCATGTCCACGGCCTGAGTTGGTATTGGGTCTTACAAGTCATAGTGACT |
| | TTTCTGGGTTGACCATTTTACTCCAGTTAAACGAAGTGGAGGGGTTGCAGA |
| | TTCGGAAGGAACAACGGTGGATCAGCATCAAACCGCTTCCAGACGCCTTTA |
| | TTGTCAACGTAGGTGATATTCTCGAAATTATGACCAACGGGATCTATCGTA |
| | GTGTTGAGCACCGTGCAGTCGTGAATAGTACCAAGGAGCGGCTTTCCATC |
| | GCCACATTCCATGACTCTAAATTGGAATCCGAAATCGGTCCTATCTCTTCGT |
| | TGGTTACTCCTGAGACCCCTGCATTATTCAAGCGCGGGCGCTACGAAGAC |
| | ATTCTCAAGGAAAACCTTTCGCGCAAACTTGATGGCAAGTCTTTCCTGGATT |
| | ACATGCGCATGTGA |
| CODM | ATGGAGACCCCAATCTTGATCAAACTTGGCAACGGGCTCTCGATCC |
| E259A | CTAGCGTCCAAGAGCTCGCCAAGTTGACCCTGGCCGAGATCCCAA |
| SEQ ID | GTCGGTATACATGCACAGGTGAGAGCCCACTTAACAACATCGGTGC |
| NO: 6 | GTCAGTAACAGACGATGAAACGGTGCCGGTCATTGATTTGCAAAAC |
| | TTATTAAGTCCAGAGCCAGTAGTGGGGAAATTAGAGTTGGACAAGT |
| | TACACTCCGCTTGCAAAGAGTGGGGCTTCTTTCAGCTTGTCAACCA |
| | TGGCGTTGATGCCTTGTTAATGGACAACATTAAGAGCGAAATCAAG |
| | GGCTTTTTTAACCTGCCGATGAATGAGAAGACCAAATACGGTCAGC |
| | AGGACGGCGACTTTGAAGGGTTCGGTCAGCCTTATATTGAATCTGA |
| | GGATCAGCGCTTGGATTGGACTGAGGTGTTCTCAATGCTCTCGCTG |
| | CCACTTCACCTGCGCAAGCCGCACCTTTTTCCAGAACTTCCACTTC |
| | CGTTTCGCGAGACCCTGGAGTCGTACTTGAGCAAGATGAAAAAACT |
| | GTCAACGGTGGTGTTTGAGATGTTAGAAAAGAGTTTGCAACTTGTTG |
| | AGATTAAAGGTATGACTGACTTGTTCGAAGACGGGCTCCAAACGAT |
| | GCGCATGAATTACTATCCTCCATGTCCACGGCCTGAGTTGGTATTG |
| | GGTCTTACAAGTCATAGTGACTTTTCTGGGTTGACCATTTTACTCCA |
| | GTTAAACGAAGTGGAGGGGTTGCAGATTCGGAAGGAAGCACGGTG |
| | GATCAGCATCAAACCGCTTCCAGACGCCTTTATTGTCAACGTAGGT |
| | GATATTCTCGAAATTATGACCAACGGGATCTATCGTAGTGTTGAGCA |
| | CCGTGCAGTCGTGAATAGTACCAAGGAGCGGCTTTCCATCGCCACA |
| | TTCCATGACTCTAAATTGGAATCCGAAATCGGTCCTATCTCTTCGTT |
| | GGTTACTCCTGAGACCCCTGCATTATTCAAGCGCGGGCGCTACGAA |
| | GACATTCTCAAGGAAAACCTTTCGCGCAAACTTGATGGCAAGTCTTT |
| | CCTGGATTACATGCGCATGTGA |
| CODM | ATGGAGACCCCAATCTTGATCAAACTTGGCAACGGGCTCTCGATCC |
| E259S | CTAGCGTCCAAGAGCTCGCCAAGTTGACCCTGGCCGAGATCCCAA |
| SEQ ID | GTCGGTATACATGCACAGGTGAGAGCCCACTTAACAACATCGGTGC |
| NO: 7 | GTCAGTAACAGACGATGAAACGGTGCCGGTCATTGATTTGCAAAAC |
| | TTATTAAGTCCAGAGCCAGTAGTGGGGAAATTAGAGTTGGACAAGT |
| | TACACTCCGCTTGCAAAGAGTGGGGCTTCTTTCAGCTTGTCAACCA |
| | TGGCGTTGATGCCTTGTTAATGGACAACATTAAGAGCGAAATCAAG |
| | GGCTTTTTTAACCTGCCGATGAATGAGAAGACCAAATACGGTCAGC |
| | AGGACGGCGACTTTGAAGGGTTCGGTCAGCCTTATATTGAATCTGA |
| | GGATCAGCGCTTGGATTGGACTGAGGTGTTCTCAATGCTCTCGCTG |
| | CCACTTCACCTGCGCAAGCCGCACCTTTTTCCAGAACTTCCACTTC |
| | CGTTTCGCGAGACCCTGGAGTCGTACTTGAGCAAGATGAAAAAACT |
| | GTCAACGGTGGTGTTTGAGATGTTAGAAAAGAGTTTGCAACTTGTTG |
| | AGATTAAAGGTATGACTGACTTGTTCGAAGACGGGCTCCAAACGAT |
| | GCGCATGAATTACTATCCTCCATGTCCACGGCCTGAGTTGGTATTG |
| | GGTCTTACAAGTCATAGTGACTTTTCTGGGTTGACCATTTTACTCCA |
| | GTTAAACGAAGTGGAGGGGTTGCAGATTCGGAAGGAAAGTCGGTG |
| | GATCAGCATCAAACCGCTTCCAGACGCCTTTATTGTCAACGTAGGT |
| | GATATTCTCGAAATTATGACCAACGGGATCTATCGTAGTGTTGAGCA |
| | CCGTGCAGTCGTGAATAGTACCAAGGAGCGGCTTTCCATCGCCACA |
| | TTCCATGACTCTAAATTGGAATCCGAAATCGGTCCTATCTCTTCGTT |
| | GGTTACTCCTGAGACCCCTGCATTATTCAAGCGCGGGCGCTACGAA |
| | GACATTCTCAAGGAAAACCTTTCGCGCAAACTTGATGGCAAGTCTTT |
| | CCTGGATTACATGCGCATGTGA |
| CODM | ATGGAGACCCCAATCTTGATCAAACTTGGCAACGGGCTCTCGATCC |
| E259G | CTAGCGTCCAAGAGCTCGCCAAGTTGACCCTGGCCGAGATCCCAA |
| SEQ ID | GTCGGTATACATGCACAGGTGAGAGCCCACTTAACAACATCGGTGC |
| NO: 8 | GTCAGTAACAGACGATGAAACGGTGCCGGTCATTGATTTGCAAAAC |
| | TTATTAAGTCCAGAGCCAGTAGTGGGGAAATTAGAGTTGGACAAGT |
| | TACACTCCGCTTGCAAAGAGTGGGGCTTCTTTCAGCTTGTCAACCA |
| | TGGCGTTGATGCCTTGTTAATGGACAACATTAAGAGCGAAATCAAG |
| | GGCTTTTTTAACCTGCCGATGAATGAGAAGACCAAATACGGTCAGC |
| | AGGACGGCGACTTTGAAGGGTTCGGTCAGCCTTATATTGAATCTGA |
| | GGATCAGCGCTTGGATTGGACTGAGGTGTTCTCAATGCTCTCGCTG |
| | CCACTTCACCTGCGCAAGCCGCACCTTTTTCCAGAACTTCCACTTC |
| | CGTTTCGCGAGACCCTGGAGTCGTACTTGAGCAAGATGAAAAAACT |
| | GTCAACGGTGGTGTTTGAGATGTTAGAAAAGAGTTTGCAACTTGTTG |
| | AGATTAAAGGTATGACTGACTTGTTCGAAGACGGGCTCCAAACGAT |
| | GCGCATGAATTACTATCCTCCATGTCCACGGCCTGAGTTGGTATTG |
| | GGTCTTACAAGTCATAGTGACTTTTCTGGGTTGACCATTTTACTCCA |
| | GTTAAACGAAGTGGAGGGGTTGCAGATTCGGAAGGAAGGTCGGTG |
| | GATCAGCATCAAACCGCTTCCAGACGCCTTTATTGTCAACGTAGGT |
| | GATATTCTCGAAATTATGACCAACGGGATCTATCGTAGTGTTGAGCA |
| | CCGTGCAGTCGTGAATAGTACCAAGGAGCGGCTTTCCATCGCCACA |
| | TTCCATGACTCTAAATTGGAATCCGAAATCGGTCCTATCTCTTCGTT |
| | GGTTACTCCTGAGACCCCTGCATTATTCAAGCGCGGGCGCTACGAA |
| | GACATTCTCAAGGAAAACCTTTCGCGCAAACTTGATGGCAAGTCTTT |
| | CCTGGATTACATGCGCATGTGA |
| CODM | ATGGAGACCCCAATCTTGATCAAACTTGGCAACGGGCTCTCGATCC |
| R260T | CTAGCGTCCAAGAGCTCGCCAAGTTGACCCTGGCCGAGATCCCAA |
| SEQ ID | GTCGGTATACATGCACAGGTGAGAGCCCACTTAACAACATCGGTGC |
| NO: 9 | GTCAGTAACAGACGATGAAACGGTGCCGGTCATTGATTTGCAAAAC |
| | TTATTAAGTCCAGAGCCAGTAGTGGGGAAATTAGAGTTGGACAAGT |
| | TACACTCCGCTTGCAAAGAGTGGGGCTTCTTTCAGCTTGTCAACCA |
| | TGGCGTTGATGCCTTGTTAATGGACAACATTAAGAGCGAAATCAAG |
| | GGCTTTTTTAACCTGCCGATGAATGAGAAGACCAAATACGGTCAGC |
| | AGGACGGCGACTTTGAAGGGTTCGGTCAGCCTTATATTGAATCTGA |
| | GGATCAGCGCTTGGATTGGACTGAGGTGTTCTCAATGCTCTCGCTG |
| | CCACTTCACCTGCGCAAGCCGCACCTTTTTCCAGAACTTCCACTTC |
| | CGTTTCGCGAGACCCTGGAGTCGTACTTGAGCAAGATGAAAAAACT |
| | GTCAACGGTGGTGTTTGAGATGTTAGAAAAGAGTTTGCAACTTGTTG |
| | AGATTAAAGGTATGACTGACTTGTTCGAAGACGGGCTCCAAACGAT |
| | GCGCATGAATTACTATCCTCCATGTCCACGGCCTGAGTTGGTATTG |
| | GGTCTTACAAGTCATAGTGACTTTTCTGGGTTGACCATTTTACTCCA |
| | GTTAAACGAAGTGGAGGGGTTGCAGATTCGGAAGGAAGAGACGTG |
| | GATCAGCATCAAACCGCTTCCAGACGCCTTTATTGTCAACGTAGGT |
| | GATATTCTCGAAATTATGACCAACGGGATCTATCGTAGTGTTGAGCA |
| | CCGTGCAGTCGTGAATAGTACCAAGGAGCGGCTTTCCATCGCCACA |
| | TTCCATGACTCTAAATTGGAATCCGAAATCGGTCCTATCTCTTCGTT |
| | GGTTACTCCTGAGACCCCTGCATTATTCAAGCGCGGGCGCTACGAA |
| | GACATTCTCAAGGAAAACCTTTCGCGCAAACTTGATGGCAAGTCTTT |
| | CCTGGATTACATGCGCATGTGA |
| CODM | ATGGAGACCCCAATCTTGATCAAACTTGGCAACGGGCTCTCGATCC |
| E259G + | CTAGCGTCCAAGAGCTCGCCAAGTTGACCCTGGCCGAGATCCCAA |
| R260T | GTCGGTATACATGCACAGGTGAGAGCCCACTTAACAACATCGGTGC |
| SEQ ID | GTCAGTAACAGACGATGAAACGGTGCCGGTCATTGATTTGCAAAAC |
| NO: 10 | TTATTAAGTCCAGAGCCAGTAGTGGGGAAATTAGAGTTGGACAAGT |
| | TACACTCCGCTTGCAAAGAGTGGGGCTTCTTTCAGCTTGTCAACCA |
| | TGGCGTTGATGCCTTGTTAATGGACAACATTAAGAGCGAAATCAAG |
| | GGCTTTTTTAACCTGCCGATGAATGAGAAGACCAAATACGGTCAGC |
| | AGGACGGCGACTTTGAAGGGTTCGGTCAGCCTTATATTGAATCTGA |
| | GGATCAGCGCTTGGATTGGACTGAGGTGTTCTCAATGCTCTCGCTG |
| | CCACTTCACCTGCGCAAGCCGCACCTTTTTCCAGAACTTCCACTTC |
| | CGTTTCGCGAGACCCTGGAGTCGTACTTGAGCAAGATGAAAAAACT |
| | GTCAACGGTGGTGTTTGAGATGTTAGAAAAGAGTTTGCAACTTGTTG |
| | AGATTAAAGGTATGACTGACTTGTTCGAAGACGGGCTCCAAACGAT |
| | GCGCATGAATTACTATCCTCCATGTCCACGGCCTGAGTTGGTATTG |
| | GGTCTTACAAGTCATAGTGACTTTTCTGGGTTGACCATTTTACTCCA |
| | GTTAAACGAAGTGGAGGGGTTGCAGATTCGGAAGGAAGGTacgTGG |
| | ATCAGCATCAAACCGCTTCCAGACGCCTTTATTGTCAACGTAGGTG |
| | ATATTCTCGAAATTATGACCAACGGGATCTATCGTAGTGTTGAGCAC |
| | CGTGCAGTCGTGAATAGTACCAAGGAGCGGCTTTCCATCGCCACAT |
| | TCCATGACTCTAAATTGGAATCCGAAATCGGTCCTATCTCTTCGTTG |
| | GTTACTCCTGAGACCCCTGCATTATTCAAGCGCGGGCGCTACGAAG |
| | ACATTCTCAAGGAAAACCTTTCGCGCAAACTTGATGGCAAGTCTTTC |
| | CTGGATTACATGCGCATGTGA |
| CODM | CGGTCGTCAGACTGTCGATGAAGCCCTGAAAGACGCGCAGACTGG |
| R260K | ATCCATGGAGACCCCAATCTTGATCAAACTTGGCAACGGGCTCTCG |
| (UMg11) | ATCCCTAGCGTCCAAGAGCTCGCCAAGTTGACCCTGGCCGAGATC |
| SEQ ID | CCAAGTCGGTATACATGCACAGGTGAGAGCCCACTTAACAACATCG |
| NO: 11 | GTGCGTCAGTAACAGACGATGAAACGGTGCCGGTCATTGATTTGCA |
| | AAACTTATTAAGTCCAGAGCCAGTAGTGGGGAAATTAGAGTTGGAC |
| | AAGTTACACTCCGCTTGCAAAGAGTGGGGCTTCTTTCAGCTTGTCA |
| | ACCATGGCGTTGATGCCTTGTTAATGGACAACATTAAGAGCGAAAT |
| | CAAGGGCTTTTTTAACCTGCCGATGAATGAGAAGACCAAATACGGT |
| | CAGCAGGACGGCGACTTTGAAGGGTTCGGTCAGCCTTATATTGAAT |
| | CTGAGGATCAGCGCTTGGATTGGACTGAGGTGTTCTCAATGCTCTC |
| | GCTGCCACTTCACCTGCGCAAGCCGCACCTTTTTCCAGAACTTCCA |
| | CTTCCGTTTCGCGAGACCCTGGAGTCGTACTTGAGCAAGATGAAAA |
| | AACTGTCAACGGTGGTGTTTGAGATGTTAGAAAAGAGTTTGCAACTT |
| | GTTGAGATTAAAGGTATGACTGACTTGTTCGAAGACGGGCTCCAAA |
| | CGATGCGCATGAATTACTATCCTCCATGTCCACGGCCTGAGTTGGT |
| | ATTGGGTCTTACAAGTCATAGTGACTTTTCTGGGTTGACCATTTTAC |
| | TCCAGTTAAACGAAGTGGAGGGGTTGCAGATTCGGAAGGAAGAGaa |
| | aTGGATCAGCATCAAACCGCTTCCAGACGCCTTTATTGTCAACGTAG |
| | GTGATATTCTCGAAATTATGACCAACGGGATCTATCGTAGTGTTGAG |
| | CACCGTGCAGTCGTGAATAGTACCAAGGAGCGGCTTTCCATCGCCA |
| | CATTCCATGACTCTAAATTGGAATCCGAAATCGGTCCTATCTCTTCG |
| | TTGGTTACTCCTGAGACCCCTGCATTATTCAAGCGCGGGCGCTACG |
| | AAGACATTCTCAAGGAAAACCTTTCGCGCAAACTTGATGGCAAGTCT |
| | TTCCTGGATTACATGCGCATGTGACTCGAGCACCACCACCACCACC |
| | ACTGAGATCCGGCTGCTAA |
| CODM | CGGTCGTCAGACTGTCGATGAAGCCCTGAAAGACGCGCAGACTGG |
| E259D + | ATCCATGGAGACCCCAATCTTGATCAAACTTGGCAACGGGCTCTCG |
| R260K | ATCCCTAGCGTCCAAGAGCTCGCCAAGTTGACCCTGGCCGAGATC |
| (UMg12) | CCAAGTCGGTATACATGCACAGGTGAGAGCCCACTTAACAACATCG |
| SEQ ID | GTGCGTCAGTAACAGACGATGAAACGGTGCCGGTCATTGATTTGCA |
| NO: 12 | AAACTTATTAAGTCCAGAGCCAGTAGTGGGGAAATTAGAGTTGGAC |
| | AAGTTACACTCCGCTTGCAAAGAGTGGGGCTTCTTTCAGCTTGTCA |
| | ACCATGGCGTTGATGCCTTGTTAATGGACAACATTAAGAGCGAAAT |
| | CAAGGGCTTTTTTAACCTGCCGATGAATGAGAAGACCAAATACGGT |
| | CAGCAGGACGGCGACTTTGAAGGGTTCGGTCAGCCTTATATTGAAT |
| | CTGAGGATCAGCGCTTGGATTGGACTGAGGTGTTCTCAATGCTCTC |
| | GCTGCCACTTCACCTGCGCAAGCCGCACCTTTTTCCAGAACTTCCA |
| | CTTCCGTTTCGCGAGACCCTGGAGTCGTACTTGAGCAAGATGAAAA |
| | AACTGTCAACGGTGGTGTTTGAGATGTTAGAAAAGAGTTTGCAACTT |
| | GTTGAGATTAAAGGTATGACTGACTTGTTCGAAGACGGGCTCCAAA |
| | CGATGCGCATGAATTACTATCCTCCATGTCCACGGCCTGAGTTGGT |
| | ATTGGGTCTTACAAGTCATAGTGACTTTTCTGGGTTGACCATTTTAC |
| | TCCAGTTAAACGAAGTGGAGGGGTTGCAGATTCGGAAGGAAGACaa |
| | aTGGATCAGCATCAAACCGCTTCCAGACGCCTTTATTGTCAACGTAG |
| | GTGATATTCTCGAAATTATGACCAACGGGATCTATCGTAGTGTTGAG |
| | CACCGTGCAGTCGTGAATAGTACCAAGGAGCGGCTTTCCATCGCCA |
| | CATTCCATGACTCTAAATTGGAATCCGAAATCGGTCCTATCTCTTCG |
| | TTGGTTACTCCTGAGACCCCTGCATTATTCAAGCGCGGGCGCTACG |
| | AAGACATTCTCAAGGAAAACCTTTCGCGCAAACTTGATGGCAAGTCT |
| | TTCCTGGATTACATGCGCATGTGACTCGAGCACCACCACCACCACC |
| | ACTGAGATCCGGCTGCTAA |
| CODM | CGGTCGTCAGACTGTCGATGAAGCCCTGAAAGACGCGCAGACTGG |
| E259G + | ATCCATGGAGACCCCAATCTTGATCAAACTTGGCAACGGGCTCTCG |
| R260K | ATCCCTAGCGTCCAAGAGCTCGCCAAGTTGACCCTGGCCGAGATC |
| (UMg13) | CCAAGTCGGTATACATGCACAGGTGAGAGCCCACTTAACAACATCG |
| SEQ ID | GTGCGTCAGTAACAGACGATGAAACGGTGCCGGTCATTGATTTGCA |
| NO: 13 | AAACTTATTAAGTCCAGAGCCAGTAGTGGGGAAATTAGAGTTGGAC |
| | AAGTTACACTCCGCTTGCAAAGAGTGGGGCTTCTTTCAGCTTGTCA |
| | ACCATGGCGTTGATGCCTTGTTAATGGACAACATTAAGAGCGAAAT |
| | CAAGGGCTTTTTTAACCTGCCGATGAATGAGAAGACCAAATACGGT |
| | CAGCAGGACGGCGACTTTGAAGGGTTCGGTCAGCCTTATATTGAAT |
| | CTGAGGATCAGCGCTTGGATTGGACTGAGGTGTTCTCAATGCTCTC |
| | GCTGCCACTTCACCTGCGCAAGCCGCACCTTTTTCCAGAACTTCCA |
| | CTTCCGTTTCGCGAGACCCTGGAGTCGTACTTGAGCAAGATGAAAA |
| | AACTGTCAACGGTGGTGTTTGAGATGTTAGAAAAGAGTTTGCAACTT |
| | GTTGAGATTAAAGGTATGACTGACTTGTTCGAAGACGGGCTCCAAA |
| | CGATGCGCATGAATTACTATCCTCCATGTCCACGGCCTGAGTTGGT |
| | ATTGGGTCTTACAAGTCATAGTGACTTTTCTGGGTTGACCATTTTAC |
| | TCCAGTTAAACGAAGTGGAGGGGTTGCAGATTCGGAAGGAAggtaaa |
| | TGGATCAGCATCAAACCGCTTCCAGACGCCTTTATTGTCAACGTAG |
| | GTGATATTCTCGAAATTATGACCAACGGGATCTATCGTAGTGTTGAG |
| | CACCGTGCAGTCGTGAATAGTACCAAGGAGCGGCTTTCCATCGCCA |
| | CATTCCATGACTCTAAATTGGAATCCGAAATCGGTCCTATCTCTTCG |
| | TTGGTTACTCCTGAGACCCCTGCATTATTCAAGCGCGGGCGCTACG |
| | AAGACATTCTCAAGGAAAACCTTTCGCGCAAACTTGATGGCAAGTCT |
| | TTCCTGGATTACATGCGCATGTGACTCGAGCACCACCACCACCACC |
| | ACTGAGATCCGGCTGCTAA |
| CODM | CGGTCGTCAGACTGTCGATGAAGCCCTGAAAGACGCGCAGACTGG |
| WT* | ATCCATGGAAACCCCAATCCTGATCAAACTTGGCAACGGGCTCTCG |
| (UMg14) | ATCCCTAGCGTCCAAGAGCTCGCCAAGTTGACCCTGGCCGAGATC |
| SEQ ID | CCAAGTCGGTATACATGCACAGGTGAGAGCCCACTTAACAACATCG |
| NO: 37 | GTGCGTCAGTAACAGACGATGAAACGGTGCCGGTCATTGATTTGCA |
| | AAACTTATTAAGTCCAGAGCCAGTAGTGGGGAAATTAGAGTTGGAC |
| | AAGTTACACTCCGCTTGCAAAGAGTGGGGCTTCTTTCAGCTTGTCA |
| | ACCATGGCGTTGATGCCTTGTTAATGGACAACATTAAGAGCGAAAT |
| | CAAGGGCTTTTTTAACCTGCCGATGAATGAGAAGACCAAATACGGT |
| | CAGCAGGACGGCGACTTTGAAGGGTTCGGTCAGCCTTATATTGAAT |
| | CTGAGGATCAGCGCTTGGATTGGACTGAGGTGTTCTCAATGCTCTC |
| | GCTGCCACTTCACCTGCGCAAGCCGCACCTTTTTCCAGAACTTCCA |
| | CTTCCGTTTCGCGAGACCCTGGAGTCGTACTTGAGCAAGATGAAAA |
| | AACTGTCAACGGTGGTGTTTGAGATGTTAGAAAAGAGTTTGCAACTT |
| | GTTGAGATTAAAGGTATGACTGACTTGTTCGAAGACGGGCTCCAAA |
| | CGATGCGCATGAATTACTATCCTCCATGTCCACGGCCTGAGTTGGT |
| | ATTGGGTCTTACAAGTCATAGTGACTTTTCTGGGTTGACCATTTTAC |
| | TCCAGTTAAACGAAGTGGAGGGGTTGCAGATTCGGAAGGAAGAGC |
| | GGTGGATCAGCATCAAACCGCTTCCAGACGCCTTTATTGTCAACGT |
| | AGGTGATATTCTCGAAATTATGACCAACGGGATCTATCGTAGTGTTG |
| | AGCACCGTGCAGTCGTGAATAGTACCAAGGAGCGGCTTTCCATCGC |
| | CACATTCCATGACTCTAAATTGGAATCCGAAATCGGTCCTATCTCTT |
| | CGTTGGTTACTCCTGAGACCCCTGCATTATTCAAGCGCGGGCGCTA |
| | CGAAGACATTCTCAAGGAAAACCTTTCGCGCAAACTTGATGGCAAG |
| | TCTTTCCTGGATTACATGCGTATGTGACTCGAGCACCACCACCACC |
| | ACCACTGAGATCCGGCTGCTAA |
| CODM | CGGTCGTCAGACTGTCGATGAAGCCCTGAAAGACGCGCAGACTGG |
| T3K + P4A + | ATCCATGGAAAAAGCAAAACTGATGAAACTTGGCAACGGGCTCTCG |
| 15K + | ATCCCTAGCGTCCAAGAGCTCGCCAAGTTGACCCTGGCCGAGATC |
| 17M | CCAAGTCGGTATACATGCACAGGTGAGAGCCCACTTAACAACATCG |
| (UMg8) | GTGCGTCAGTAACAGACGATGAAACGGTGCCGGTCATTGATTTGCA |
| SEQ ID | AAACTTATTAAGTCCAGAGCCAGTAGTGGGGAAATTAGAGTTGGAC |
| NO: 38 | AAGTTACACTCCGCTTGCAAAGAGTGGGGCTTCTTTCAGCTTGTCA |
| | ACCATGGCGTTGATGCCTTGTTAATGGACAACATTAAGAGCGAAAT |
| | CAAGGGCTTTTTTAACCTGCCGATGAATGAGAAGACCAAATACGGT |
| | CAGCAGGACGGCGACTTTGAAGGGTTCGGTCAGCCTTATATTGAAT |
| | CTGAGGATCAGCGCTTGGATTGGACTGAGGTGTTCTCAATGCTCTC |
| | GCTGCCACTTCACCTGCGCAAGCCGCACCTTTTTCCAGAACTTCCA |
| | CTTCCGTTTCGCGAGACCCTGGAGTCGTACTTGAGCAAGATGAAAA |
| | AACTGTCAACGGTGGTGTTTGAGATGTTAGAAAAGAGTTTGCAACTT |
| | GTTGAGATTAAAGGTATGACTGACTTGTTCGAAGACGGGCTCCAAA |
| | CGATGCGCATGAATTACTATCCTCCATGTCCACGGCCTGAGTTGGT |
| | ATTGGGTCTTACAAGTCATAGTGACTTTTCTGGGTTGACCATTTTAC |
| | TCCAGTTAAACGAAGTGGAGGGGTTGCAGATTCGGAAGGAAGAGC |
| | GGTGGATCAGCATCAAACCGCTTCCAGACGCCTTTATTGTCAACGT |
| | AGGTGATATTCTCGAAATTATGACCAACGGGATCTATCGTAGTGTTG |
| | AGCACCGTGCAGTCGTGAATAGTACCAAGGAGCGGCTTTCCATCGC |
| | CACATTCCATGACTCTAAATTGGAATCCGAAATCGGTCCTATCTCTT |
| | CGTTGGTTACTCCTGAGACCCCTGCATTATTCAAGCGCGGGCGCTA |
| | CGAAGACATTCTCAAGGAAAACCTTTCGCGCAAACTTGATGGCAAG |
| | TCTTTCCTGGATTACATGCGCATGTGACTCGAGCACCACCACCACC |
| | ACCACTGAGATCCGGCTGCTAA |
| CODM | CGGTCGTCAGACTGTCGATGAAGCCCTGAAAGACGCGCAGACTGG |
| Y357S + | ATCCATGGAGACCCCAATCTTGATCAAACTTGGCAACGGGCTCTCG |
| M3601 | ATCCCTAGCGTCCAAGAGCTCGCCAAGTTGACCCTGGCCGAGATC |
| (UMg9) | CCAAGTCGGTATACATGCACAGGTGAGAGCCCACTTAACAACATCG |
| SEQ ID | GTGCGTCAGTAACAGACGATGAAACGGTGCCGGTCATTGATTTGCA |
| NO: 39 | AAACTTATTAAGTCCAGAGCCAGTAGTGGGGAAATTAGAGTTGGAC |
| | AAGTTACACTCCGCTTGCAAAGAGTGGGGCTTCTTTCAGCTTGTCA |
| | ACCATGGCGTTGATGCCTTGTTAATGGACAACATTAAGAGCGAAAT |
| | CAAGGGCTTTTTTAACCTGCCGATGAATGAGAAGACCAAATACGGT |
| | CAGCAGGACGGCGACTTTGAAGGGTTCGGTCAGCCTTATATTGAAT |
| | CTGAGGATCAGCGCTTGGATTGGACTGAGGTGTTCTCAATGCTCTC |
| | GCTGCCACTTCACCTGCGCAAGCCGCACCTTTTTCCAGAACTTCCA |
| | CTTCCGTTTCGCGAGACCCTGGAGTCGTACTTGAGCAAGATGAAAA |
| | AACTGTCAACGGTGGTGTTTGAGATGTTAGAAAAGAGTTTGCAACTT |
| | GTTGAGATTAAAGGTATGACTGACTTGTTCGAAGACGGGCTCCAAA |
| | CGATGCGCATGAATTACTATCCTCCATGTCCACGGCCTGAGTTGGT |
| | ATTGGGTCTTACAAGTCATAGTGACTTTTCTGGGTTGACCATTTTAC |
| | TCCAGTTAAACGAAGTGGAGGGGTTGCAGATTCGGAAGGAAGAGC |
| | GGTGGATCAGCATCAAACCGCTTCCAGACGCCTTTATTGTCAACGT |
| | AGGTGATATTCTCGAAATTATGACCAACGGGATCTATCGTAGTGTTG |
| | AGCACCGTGCAGTCGTGAATAGTACCAAGGAGCGGCTTTCCATCGC |
| | CACATTCCATGACTCTAAATTGGAATCCGAAATCGGTCCTATCTCTT |
| | CGTTGGTTACTCCTGAGACCCCTGCATTATTCAAGCGCGGGCGCTA |
| | CGAAGACATTCTCAAGGAAAACCTTTCGCGCAAACTTGATGGCAAG |
| | TCTTTCCTGGATTCTATGCGTATCTGACTCGAGCACCACCACCACCA |
| | CCACTGAGATCCGGCTGCTAA |
| CODM | CGGTCGTCAGACTGTCGATGAAGCCCTGAAAGACGCGCAGACTGG |
| T3K + P4A + | ATCCATGGAAAAAGCAAAACTGATGAAACTTGGCAACGGGCTCTCG |
| 15K + | ATCCCTAGCGTCCAAGAGCTCGCCAAGTTGACCCTGGCCGAGATC |
| 17M + | CCAAGTCGGTATACATGCACAGGTGAGAGCCCACTTAACAACATCG |
| Y357S + | GTGCGTCAGTAACAGACGATGAAACGGTGCCGGTCATTGATTTGCA |
| M3601 | AAACTTATTAAGTCCAGAGCCAGTAGTGGGGAAATTAGAGTTGGAC |
| (UMg10) | AAGTTACACTCCGCTTGCAAAGAGTGGGGCTTCTTTCAGCTTGTCA |
| SEQ ID | ACCATGGCGTTGATGCCTTGTTAATGGACAACATTAAGAGCGAAAT |
| NO: 40 | CAAGGGCTTTTTTAACCTGCCGATGAATGAGAAGACCAAATACGGT |
| | CAGCAGGACGGCGACTTTGAAGGGTTCGGTCAGCCTTATATTGAAT |
| | CTGAGGATCAGCGCTTGGATTGGACTGAGGTGTTCTCAATGCTCTC |
| | GCTGCCACTTCACCTGCGCAAGCCGCACCTTTTTCCAGAACTTCCA |
| | CTTCCGTTTCGCGAGACCCTGGAGTCGTACTTGAGCAAGATGAAAA |
| | AACTGTCAACGGTGGTGTTTGAGATGTTAGAAAAGAGTTTGCAACTT |
| | GTTGAGATTAAAGGTATGACTGACTTGTTCGAAGACGGGCTCCAAA |
| | CGATGCGCATGAATTACTATCCTCCATGTCCACGGCCTGAGTTGGT |
| | ATTGGGTCTTACAAGTCATAGTGACTTTTCTGGGTTGACCATTTTAC |
| | TCCAGTTAAACGAAGTGGAGGGGTTGCAGATTCGGAAGGAAGAGC |
| | GGTGGATCAGCATCAAACCGCTTCCAGACGCCTTTATTGTCAACGT |
| | AGGTGATATTCTCGAAATTATGACCAACGGGATCTATCGTAGTGTTG |
| | AGCACCGTGCAGTCGTGAATAGTACCAAGGAGCGGCTTTCCATCGC |
| | CACATTCCATGACTCTAAATTGGAATCCGAAATCGGTCCTATCTCTT |
| | CGTTGGTTACTCCTGAGACCCCTGCATTATTCAAGCGCGGGCGCTA |
| | CGAAGACATTCTCAAGGAAAACCTTTCGCGCAAACTTGATGGCAAG |
| | TCTTTCCTGGATTCTATGCGTATCTGACTCGAGCACCACCACCACCA |
| | CCACTGAGATCCGGCTGCTAA |
| CODM | CGGTCGTCAGACTGTCGATGAAGCCCTGAAAGACGCGCAGACTGG |
| T3K | ATCCATGGAAAAACCAATCCTGATCAAACTTGGCAACGGGCTCTCG |
| (UMg15) | ATCCCTAGCGTCCAAGAGCTCGCCAAGTTGACCCTGGCCGAGATC |
| SEQ ID | CCAAGTCGGTATACATGCACAGGTGAGAGCCCACTTAACAACATCG |
| NO: 41 | GTGCGTCAGTAACAGACGATGAAACGGTGCCGGTCATTGATTTGCA |
| | AAACTTATTAAGTCCAGAGCCAGTAGTGGGGAAATTAGAGTTGGAC |
| | AAGTTACACTCCGCTTGCAAAGAGTGGGGCTTCTTTCAGCTTGTCA |
| | ACCATGGCGTTGATGCCTTGTTAATGGACAACATTAAGAGCGAAAT |
| | CAAGGGCTTTTTTAACCTGCCGATGAATGAGAAGACCAAATACGGT |
| | CAGCAGGACGGCGACTTTGAAGGGTTCGGTCAGCCTTATATTGAAT |
| | CTGAGGATCAGCGCTTGGATTGGACTGAGGTGTTCTCAATGCTCTC |
| | GCTGCCACTTCACCTGCGCAAGCCGCACCTTTTTCCAGAACTTCCA |
| | CTTCCGTTTCGCGAGACCCTGGAGTCGTACTTGAGCAAGATGAAAA |
| | AACTGTCAACGGTGGTGTTTGAGATGTTAGAAAAGAGTTTGCAACTT |
| | GTTGAGATTAAAGGTATGACTGACTTGTTCGAAGACGGGCTCCAAA |
| | CGATGCGCATGAATTACTATCCTCCATGTCCACGGCCTGAGTTGGT |
| | ATTGGGTCTTACAAGTCATAGTGACTTTTCTGGGTTGACCATTTTAC |
| | TCCAGTTAAACGAAGTGGAGGGGTTGCAGATTCGGAAGGAAGAGC |
| | GGTGGATCAGCATCAAACCGCTTCCAGACGCCTTTATTGTCAACGT |
| | AGGTGATATTCTCGAAATTATGACCAACGGGATCTATCGTAGTGTTG |
| | AGCACCGTGCAGTCGTGAATAGTACCAAGGAGCGGCTTTCCATCGC |
| | CACATTCCATGACTCTAAATTGGAATCCGAAATCGGTCCTATCTCTT |
| | CGTTGGTTACTCCTGAGACCCCTGCATTATTCAAGCGCGGGCGCTA |
| | CGAAGACATTCTCAAGGAAAACCTTTCGCGCAAACTTGATGGCAAG |
| | TCTTTCCTGGATTACATGCGTATGTGACTCGAGCACCACCACCACC |
| | ACCACTGAGATCCGGCTGCTAA |
| CODM | CGGTCGTCAGACTGTCGATGAAGCCCTGAAAGACGCGCAGACTGG |
| P4A | ATCCATGGAAACCGCAATCCTGATCAAACTTGGCAACGGGCTCTCG |
| (UMg16) | ATCCCTAGCGTCCAAGAGCTCGCCAAGTTGACCCTGGCCGAGATC |
| SEQ ID | CCAAGTCGGTATACATGCACAGGTGAGAGCCCACTTAACAACATCG |
| NO: 42 | GTGCGTCAGTAACAGACGATGAAACGGTGCCGGTCATTGATTTGCA |
| | AAACTTATTAAGTCCAGAGCCAGTAGTGGGGAAATTAGAGTTGGAC |
| | AAGTTACACTCCGCTTGCAAAGAGTGGGGCTTCTTTCAGCTTGTCA |
| | ACCATGGCGTTGATGCCTTGTTAATGGACAACATTAAGAGCGAAAT |
| | CAAGGGCTTTTTTAACCTGCCGATGAATGAGAAGACCAAATACGGT |
| | CAGCAGGACGGCGACTTTGAAGGGTTCGGTCAGCCTTATATTGAAT |
| | CTGAGGATCAGCGCTTGGATTGGACTGAGGTGTTCTCAATGCTCTC |
| | GCTGCCACTTCACCTGCGCAAGCCGCACCTTTTTCCAGAACTTCCA |
| | CTTCCGTTTCGCGAGACCCTGGAGTCGTACTTGAGCAAGATGAAAA |
| | AACTGTCAACGGTGGTGTTTGAGATGTTAGAAAAGAGTTTGCAACTT |
| | GTTGAGATTAAAGGTATGACTGACTTGTTCGAAGACGGGCTCCAAA |
| | CGATGCGCATGAATTACTATCCTCCATGTCCACGGCCTGAGTTGGT |
| | ATTGGGTCTTACAAGTCATAGTGACTTTTCTGGGTTGACCATTTTAC |
| | TCCAGTTAAACGAAGTGGAGGGGTTGCAGATTCGGAAGGAAGAGC |
| | GGTGGATCAGCATCAAACCGCTTCCAGACGCCTTTATTGTCAACGT |
| | AGGTGATATTCTCGAAATTATGACCAACGGGATCTATCGTAGTGTTG |
| | AGCACCGTGCAGTCGTGAATAGTACCAAGGAGCGGCTTTCCATCGC |
| | CACATTCCATGACTCTAAATTGGAATCCGAAATCGGTCCTATCTCTT |
| | CGTTGGTTACTCCTGAGACCCCTGCATTATTCAAGCGCGGGCGCTA |
| | CGAAGACATTCTCAAGGAAAACCTTTCGCGCAAACTTGATGGCAAG |
| | TCTTTCCTGGATTACATGCGTATGTGACTCGAGCACCACCACCACC |
| | ACCACTGAGATCCGGCTGCTAA |
| CODM 15K | CGGTCGTCAGACTGTCGATGAAGCCCTGAAAGACGCGCAGACTGG |
| (UMg17) | ATCCATGGAAACCCCAAAACTGATCAAACTTGGCAACGGGCTCTCG |
| SEQ ID | ATCCCTAGCGTCCAAGAGCTCGCCAAGTTGACCCTGGCCGAGATC |
| NO: 43 | CCAAGTCGGTATACATGCACAGGTGAGAGCCCACTTAACAACATCG |
| | GTGCGTCAGTAACAGACGATGAAACGGTGCCGGTCATTGATTTGCA |
| | AAACTTATTAAGTCCAGAGCCAGTAGTGGGGAAATTAGAGTTGGAC |
| | AAGTTACACTCCGCTTGCAAAGAGTGGGGCTTCTTTCAGCTTGTCA |
| | ACCATGGCGTTGATGCCTTGTTAATGGACAACATTAAGAGCGAAAT |
| | CAAGGGCTTTTTTAACCTGCCGATGAATGAGAAGACCAAATACGGT |
| | CAGCAGGACGGCGACTTTGAAGGGTTCGGTCAGCCTTATATTGAAT |
| | CTGAGGATCAGCGCTTGGATTGGACTGAGGTGTTCTCAATGCTCTC |
| | GCTGCCACTTCACCTGCGCAAGCCGCACCTTTTTCCAGAACTTCCA |
| | CTTCCGTTTCGCGAGACCCTGGAGTCGTACTTGAGCAAGATGAAAA |
| | AACTGTCAACGGTGGTGTTTGAGATGTTAGAAAAGAGTTTGCAACTT |
| | GTTGAGATTAAAGGTATGACTGACTTGTTCGAAGACGGGCTCCAAA |
| | CGATGCGCATGAATTACTATCCTCCATGTCCACGGCCTGAGTTGGT |
| | ATTGGGTCTTACAAGTCATAGTGACTTTTCTGGGTTGACCATTTTAC |
| | TCCAGTTAAACGAAGTGGAGGGGTTGCAGATTCGGAAGGAAGAGC |
| | GGTGGATCAGCATCAAACCGCTTCCAGACGCCTTTATTGTCAACGT |
| | AGGTGATATTCTCGAAATTATGACCAACGGGATCTATCGTAGTGTTG |
| | AGCACCGTGCAGTCGTGAATAGTACCAAGGAGCGGCTTTCCATCGC |
| | CACATTCCATGACTCTAAATTGGAATCCGAAATCGGTCCTATCTCTT |
| | CGTTGGTTACTCCTGAGACCCCTGCATTATTCAAGCGCGGGCGCTA |
| | CGAAGACATTCTCAAGGAAAACCTTTCGCGCAAACTTGATGGCAAG |
| | TCTTTCCTGGATTACATGCGTATGTGACTCGAGCACCACCACCACC |
| | ACCACTGAGATCCGGCTGCTAA |
| CODM 17M | CGGTCGTCAGACTGTCGATGAAGCCCTGAAAGACGCGCAGACTGG |
| (UMg18) | ATCCATGGAAACCCCAATCCTGATGAAACTTGGCAACGGGCTCTCG |
| SEQ ID | ATCCCTAGCGTCCAAGAGCTCGCCAAGTTGACCCTGGCCGAGATC |
| NO: 44 | CCAAGTCGGTATACATGCACAGGTGAGAGCCCACTTAACAACATCG |
| | GTGCGTCAGTAACAGACGATGAAACGGTGCCGGTCATTGATTTGCA |
| | AAACTTATTAAGTCCAGAGCCAGTAGTGGGGAAATTAGAGTTGGAC |
| | AAGTTACACTCCGCTTGCAAAGAGTGGGGCTTCTTTCAGCTTGTCA |
| | ACCATGGCGTTGATGCCTTGTTAATGGACAACATTAAGAGCGAAAT |
| | CAAGGGCTTTTTTAACCTGCCGATGAATGAGAAGACCAAATACGGT |
| | CAGCAGGACGGCGACTTTGAAGGGTTCGGTCAGCCTTATATTGAAT |
| | CTGAGGATCAGCGCTTGGATTGGACTGAGGTGTTCTCAATGCTCTC |
| | GCTGCCACTTCACCTGCGCAAGCCGCACCTTTTTCCAGAACTTCCA |
| | CTTCCGTTTCGCGAGACCCTGGAGTCGTACTTGAGCAAGATGAAAA |
| | AACTGTCAACGGTGGTGTTTGAGATGTTAGAAAAGAGTTTGCAACTT |
| | GTTGAGATTAAAGGTATGACTGACTTGTTCGAAGACGGGCTCCAAA |
| | CGATGCGCATGAATTACTATCCTCCATGTCCACGGCCTGAGTTGGT |
| | ATTGGGTCTTACAAGTCATAGTGACTTTTCTGGGTTGACCATTTTAC |
| | TCCAGTTAAACGAAGTGGAGGGGTTGCAGATTCGGAAGGAAGAGC |
| | GGTGGATCAGCATCAAACCGCTTCCAGACGCCTTTATTGTCAACGT |
| | AGGTGATATTCTCGAAATTATGACCAACGGGATCTATCGTAGTGTTG |
| | AGCACCGTGCAGTCGTGAATAGTACCAAGGAGCGGCTTTCCATCGC |
| | CACATTCCATGACTCTAAATTGGAATCCGAAATCGGTCCTATCTCTT |
| | CGTTGGTTACTCCTGAGACCCCTGCATTATTCAAGCGCGGGCGCTA |
| | CGAAGACATTCTCAAGGAAAACCTTTCGCGCAAACTTGATGGCAAG |
| | TCTTTCCTGGATTACATGCGTATGTGACTCGAGCACCACCACCACC |
| | ACCACTGAGATCCGGCTGCTAA |
| CODM | CGGTCGTCAGACTGTCGATGAAGCCCTGAAAGACGCGCAGACTGG |
| Y357S | ATCCATGGAAACCCCAATCCTGATCAAACTTGGCAACGGGCTCTCG |
| (UMg19) | ATCCCTAGCGTCCAAGAGCTCGCCAAGTTGACCCTGGCCGAGATC |
| NO: 45 | CCAAGTCGGTATACATGCACAGGTGAGAGCCCACTTAACAACATCG |
| | GTGCGTCAGTAACAGACGATGAAACGGTGCCGGTCATTGATTTGCA |
| | AAACTTATTAAGTCCAGAGCCAGTAGTGGGGAAATTAGAGTTGGAC |
| | AAGTTACACTCCGCTTGCAAAGAGTGGGGCTTCTTTCAGCTTGTCA |
| | ACCATGGCGTTGATGCCTTGTTAATGGACAACATTAAGAGCGAAAT |
| | CAAGGGCTTTTTTAACCTGCCGATGAATGAGAAGACCAAATACGGT |
| | CAGCAGGACGGCGACTTTGAAGGGTTCGGTCAGCCTTATATTGAAT |
| | CTGAGGATCAGCGCTTGGATTGGACTGAGGTGTTCTCAATGCTCTC |
| | GCTGCCACTTCACCTGCGCAAGCCGCACCTTTTTCCAGAACTTCCA |
| | CTTCCGTTTCGCGAGACCCTGGAGTCGTACTTGAGCAAGATGAAAA |
| | AACTGTCAACGGTGGTGTTTGAGATGTTAGAAAAGAGTTTGCAACTT |
| | GTTGAGATTAAAGGTATGACTGACTTGTTCGAAGACGGGCTCCAAA |
| | CGATGCGCATGAATTACTATCCTCCATGTCCACGGCCTGAGTTGGT |
| | ATTGGGTCTTACAAGTCATAGTGACTTTTCTGGGTTGACCATTTTAC |
| | TCCAGTTAAACGAAGTGGAGGGGTTGCAGATTCGGAAGGAAGAGC |
| | GGTGGATCAGCATCAAACCGCTTCCAGACGCCTTTATTGTCAACGT |
| | AGGTGATATTCTCGAAATTATGACCAACGGGATCTATCGTAGTGTTG |
| | AGCACCGTGCAGTCGTGAATAGTACCAAGGAGCGGCTTTCCATCGC |
| | CACATTCCATGACTCTAAATTGGAATCCGAAATCGGTCCTATCTCTT |
| | CGTTGGTTACTCCTGAGACCCCTGCATTATTCAAGCGCGGGCGCTA |
| | CGAAGACATTCTCAAGGAAAACCTTTCGCGCAAACTTGATGGCAAG |
| | TCTTTCCTGGATTCTATGCGTATGTGACTCGAGCACCACCACCACC |
| | ACCACTGAGATCCGGCTGCTAA |
| CODM | CGGTCGTCAGACTGTCGATGAAGCCCTGAAAGACGCGCAGACTGG |
| M3601 | ATCCATGGAAACCCCAATCCTGATCAAACTTGGCAACGGGCTCTCG |
| (UMg20) | ATCCCTAGCGTCCAAGAGCTCGCCAAGTTGACCCTGGCCGAGATC |
| SEQ ID | CCAAGTCGGTATACATGCACAGGTGAGAGCCCACTTAACAACATCG |
| NO: 46 | GTGCGTCAGTAACAGACGATGAAACGGTGCCGGTCATTGATTTGCA |
| | AAACTTATTAAGTCCAGAGCCAGTAGTGGGGAAATTAGAGTTGGAC |
| | AAGTTACACTCCGCTTGCAAAGAGTGGGGCTTCTTTCAGCTTGTCA |
| | ACCATGGCGTTGATGCCTTGTTAATGGACAACATTAAGAGCGAAAT |
| | CAAGGGCTTTTTTAACCTGCCGATGAATGAGAAGACCAAATACGGT |
| | CAGCAGGACGGCGACTTTGAAGGGTTCGGTCAGCCTTATATTGAAT |
| | CTGAGGATCAGCGCTTGGATTGGACTGAGGTGTTCTCAATGCTCTC |
| | GCTGCCACTTCACCTGCGCAAGCCGCACCTTTTTCCAGAACTTCCA |
| | CTTCCGTTTCGCGAGACCCTGGAGTCGTACTTGAGCAAGATGAAAA |
| | AACTGTCAACGGTGGTGTTTGAGATGTTAGAAAAGAGTTTGCAACTT |
| | GTTGAGATTAAAGGTATGACTGACTTGTTCGAAGACGGGCTCCAAA |
| | CGATGCGCATGAATTACTATCCTCCATGTCCACGGCCTGAGTTGGT |
| | ATTGGGTCTTACAAGTCATAGTGACTTTTCTGGGTTGACCATTTTAC |
| | TCCAGTTAAACGAAGTGGAGGGGTTGCAGATTCGGAAGGAAGAGC |
| | GGTGGATCAGCATCAAACCGCTTCCAGACGCCTTTATTGTCAACGT |
| | AGGTGATATTCTCGAAATTATGACCAACGGGATCTATCGTAGTGTTG |
| | AGCACCGTGCAGTCGTGAATAGTACCAAGGAGCGGCTTTCCATCGC |
| | CACATTCCATGACTCTAAATTGGAATCCGAAATCGGTCCTATCTCTT |
| | CGTTGGTTACTCCTGAGACCCCTGCATTATTCAAGCGCGGGCGCTA |
| | CGAAGACATTCTCAAGGAAAACCTTTCGCGCAAACTTGATGGCAAG |
| | TCTTTCCTGGATTACATGCGTATCTGACTCGAGCACCACCACCACC |
| | ACCACTGAGATCCGGCTGCTAA |
| CODM 15K + | CGGTCGTCAGACTGTCGATGAAGCCCTGAAAGACGCGCAGACTGG |
| M3601 | ATCCATGGAAACCCCAAAACTGATCAAACTTGGCAACGGGCTCTCG |
| (UMg21) | ATCCCTAGCGTCCAAGAGCTCGCCAAGTTGACCCTGGCCGAGATC |
| SEQ ID | CCAAGTCGGTATACATGCACAGGTGAGAGCCCACTTAACAACATCG |
| NO: 47 | GTGCGTCAGTAACAGACGATGAAACGGTGCCGGTCATTGATTTGCA |
| | AAACTTATTAAGTCCAGAGCCAGTAGTGGGGAAATTAGAGTTGGAC |
| | AAGTTACACTCCGCTTGCAAAGAGTGGGGCTTCTTTCAGCTTGTCA |
| | ACCATGGCGTTGATGCCTTGTTAATGGACAACATTAAGAGCGAAAT |
| | CAAGGGCTTTTTTAACCTGCCGATGAATGAGAAGACCAAATACGGT |
| | CAGCAGGACGGCGACTTTGAAGGGTTCGGTCAGCCTTATATTGAAT |
| | CTGAGGATCAGCGCTTGGATTGGACTGAGGTGTTCTCAATGCTCTC |
| | GCTGCCACTTCACCTGCGCAAGCCGCACCTTTTTCCAGAACTTCCA |
| | CTTCCGTTTCGCGAGACCCTGGAGTCGTACTTGAGCAAGATGAAAA |
| | AACTGTCAACGGTGGTGTTTGAGATGTTAGAAAAGAGTTTGCAACTT |
| | GTTGAGATTAAAGGTATGACTGACTTGTTCGAAGACGGGCTCCAAA |
| | CGATGCGCATGAATTACTATCCTCCATGTCCACGGCCTGAGTTGGT |
| | ATTGGGTCTTACAAGTCATAGTGACTTTTCTGGGTTGACCATTTTAC |
| | TCCAGTTAAACGAAGTGGAGGGGTTGCAGATTCGGAAGGAAGAGC |
| | GGTGGATCAGCATCAAACCGCTTCCAGACGCCTTTATTGTCAACGT |
| | AGGTGATATTCTCGAAATTATGACCAACGGGATCTATCGTAGTGTTG |
| | AGCACCGTGCAGTCGTGAATAGTACCAAGGAGCGGCTTTCCATCGC |
| | CACATTCCATGACTCTAAATTGGAATCCGAAATCGGTCCTATCTCTT |
| | CGTTGGTTACTCCTGAGACCCCTGCATTATTCAAGCGCGGGCGCTA |
| | CGAAGACATTCTCAAGGAAAACCTTTCGCGCAAACTTGATGGCAAG |
| | TCTTTCCTGGATTACATGCGTATCTGACTCGAGCACCACCACCACC |
| | ACCACTGAGATCCGGCTGCTAA |
| CODM 15K + | CGGTCGTCAGACTGTCGATGAAGCCCTGAAAGACGCGCAGACTGG |
| E259G | ATCCATGGAAACCCCAAAACTGATCAAACTTGGCAACGGGCTCTCG |
| (UMg22) | ATCCCTAGCGTCCAAGAGCTCGCCAAGTTGACCCTGGCCGAGATC |
| SEQ ID | CCAAGTCGGTATACATGCACAGGTGAGAGCCCACTTAACAACATCG |
| NO: 48 | GTGCGTCAGTAACAGACGATGAAACGGTGCCGGTCATTGATTTGCA |
| | AAACTTATTAAGTCCAGAGCCAGTAGTGGGGAAATTAGAGTTGGAC |
| | AAGTTACACTCCGCTTGCAAAGAGTGGGGCTTCTTTCAGCTTGTCA |
| | ACCATGGCGTTGATGCCTTGTTAATGGACAACATTAAGAGCGAAAT |
| | CAAGGGCTTTTTTAACCTGCCGATGAATGAGAAGACCAAATACGGT |
| | CAGCAGGACGGCGACTTTGAAGGGTTCGGTCAGCCTTATATTGAAT |
| | CTGAGGATCAGCGCTTGGATTGGACTGAGGTGTTCTCAATGCTCTC |
| | GCTGCCACTTCACCTGCGCAAGCCGCACCTTTTTCCAGAACTTCCA |
| | CTTCCGTTTCGCGAGACCCTGGAGTCGTACTTGAGCAAGATGAAAA |
| | AACTGTCAACGGTGGTGTTTGAGATGTTAGAAAAGAGTTTGCAACTT |
| | GTTGAGATTAAAGGTATGACTGACTTGTTCGAAGACGGGCTCCAAA |
| | CGATGCGCATGAATTACTATCCTCCATGTCCACGGCCTGAGTTGGT |
| | ATTGGGTCTTACAAGTCATAGTGACTTTTCTGGGTTGACCATTTTAC |
| | TCCAGTTAAACGAAGTGGAGGGGTTGCAGATTCGGAAGGAAGGTC |
| | GGTGGATCAGCATCAAACCGCTTCCAGACGCCTTTATTGTCAACGT |
| | AGGTGATATTCTCGAAATTATGACCAACGGGATCTATCGTAGTGTTG |
| | AGCACCGTGCAGTCGTGAATAGTACCAAGGAGCGGCTTTCCATCGC |
| | CACATTCCATGACTCTAAATTGGAATCCGAAATCGGTCCTATCTCTT |
| | CGTTGGTTACTCCTGAGACCCCTGCATTATTCAAGCGCGGGCGCTA |
| | CGAAGACATTCTCAAGGAAAACCTTTCGCGCAAACTTGATGGCAAG |
| | TCTTTCCTGGATTACATGCGTATGTGACTCGAGCACCACCACCACC |
| | ACCACTGAGATCCGGCTGCTAA |
| CODM | CGGTCGTCAGACTGTCGATGAAGCCCTGAAAGACGCGCAGACTGG |
| E259G + | ATCCATGGAAACCCCAATCCTGATCAAACTTGGCAACGGGCTCTCG |
| M3601 | ATCCCTAGCGTCCAAGAGCTCGCCAAGTTGACCCTGGCCGAGATC |
| (UMg23) | CCAAGTCGGTATACATGCACAGGTGAGAGCCCACTTAACAACATCG |
| SEQ ID | GTGCGTCAGTAACAGACGATGAAACGGTGCCGGTCATTGATTTGCA |
| NO: 49 | AAACTTATTAAGTCCAGAGCCAGTAGTGGGGAAATTAGAGTTGGAC |
| | AAGTTACACTCCGCTTGCAAAGAGTGGGGCTTCTTTCAGCTTGTCA |
| | ACCATGGCGTTGATGCCTTGTTAATGGACAACATTAAGAGCGAAAT |
| | CAAGGGCTTTTTTAACCTGCCGATGAATGAGAAGACCAAATACGGT |
| | CAGCAGGACGGCGACTTTGAAGGGTTCGGTCAGCCTTATATTGAAT |
| | CTGAGGATCAGCGCTTGGATTGGACTGAGGTGTTCTCAATGCTCTC |
| | GCTGCCACTTCACCTGCGCAAGCCGCACCTTTTTCCAGAACTTCCA |
| | CTTCCGTTTCGCGAGACCCTGGAGTCGTACTTGAGCAAGATGAAAA |
| | AACTGTCAACGGTGGTGTTTGAGATGTTAGAAAAGAGTTTGCAACTT |
| | GTTGAGATTAAAGGTATGACTGACTTGTTCGAAGACGGGCTCCAAA |
| | CGATGCGCATGAATTACTATCCTCCATGTCCACGGCCTGAGTTGGT |
| | ATTGGGTCTTACAAGTCATAGTGACTTTTCTGGGTTGACCATTTTAC |
| | TCCAGTTAAACGAAGTGGAGGGGTTGCAGATTCGGAAGGAAGGTC |
| | GGTGGATCAGCATCAAACCGCTTCCAGACGCCTTTATTGTCAACGT |
| | AGGTGATATTCTCGAAATTATGACCAACGGGATCTATCGTAGTGTTG |
| | AGCACCGTGCAGTCGTGAATAGTACCAAGGAGCGGCTTTCCATCGC |
| | CACATTCCATGACTCTAAATTGGAATCCGAAATCGGTCCTATCTCTT |
| | CGTTGGTTACTCCTGAGACCCCTGCATTATTCAAGCGCGGGCGCTA |
| | CGAAGACATTCTCAAGGAAAACCTTTCGCGCAAACTTGATGGCAAG |
| | TCTTTCCTGGATTACATGCGTATCTGACTCGAGCACCACCACCACC |
| | ACCACTGAGATCCGGCTGCTAA |
| CODM 15K + | CGGTCGTCAGACTGTCGATGAAGCCCTGAAAGACGCGCAGACTGG |
| E259G + | ATCCATGGAAACCCCAAAACTGATCAAACTTGGCAACGGGCTCTCG |
| M3601 | ATCCCTAGCGTCCAAGAGCTCGCCAAGTTGACCCTGGCCGAGATC |
| (UMg24) | CCAAGTCGGTATACATGCACAGGTGAGAGCCCACTTAACAACATCG |
| SEQ ID | GTGCGTCAGTAACAGACGATGAAACGGTGCCGGTCATTGATTTGCA |
| NO: 50 | AAACTTATTAAGTCCAGAGCCAGTAGTGGGGAAATTAGAGTTGGAC |
| | AAGTTACACTCCGCTTGCAAAGAGTGGGGCTTCTTTCAGCTTGTCA |
| | ACCATGGCGTTGATGCCTTGTTAATGGACAACATTAAGAGCGAAAT |
| | CAAGGGCTTTTTTAACCTGCCGATGAATGAGAAGACCAAATACGGT |
| | CAGCAGGACGGCGACTTTGAAGGGTTCGGTCAGCCTTATATTGAAT |
| | CTGAGGATCAGCGCTTGGATTGGACTGAGGTGTTCTCAATGCTCTC |
| | GCTGCCACTTCACCTGCGCAAGCCGCACCTTTTTCCAGAACTTCCA |
| | CTTCCGTTTCGCGAGACCCTGGAGTCGTACTTGAGCAAGATGAAAA |
| | AACTGTCAACGGTGGTGTTTGAGATGTTAGAAAAGAGTTTGCAACTT |
| | GTTGAGATTAAAGGTATGACTGACTTGTTCGAAGACGGGCTCCAAA |
| | CGATGCGCATGAATTACTATCCTCCATGTCCACGGCCTGAGTTGGT |
| | ATTGGGTCTTACAAGTCATAGTGACTTTTCTGGGTTGACCATTTTAC |
| | TCCAGTTAAACGAAGTGGAGGGGTTGCAGATTCGGAAGGAAGGTC |
| | GGTGGATCAGCATCAAACCGCTTCCAGACGCCTTTATTGTCAACGT |
| | AGGTGATATTCTCGAAATTATGACCAACGGGATCTATCGTAGTGTTG |
| | AGCACCGTGCAGTCGTGAATAGTACCAAGGAGCGGCTTTCCATCGC |
| | CACATTCCATGACTCTAAATTGGAATCCGAAATCGGTCCTATCTCTT |
| | CGTTGGTTACTCCTGAGACCCCTGCATTATTCAAGCGCGGGCGCTA |
| | CGAAGACATTCTCAAGGAAAACCTTTCGCGCAAACTTGATGGCAAG |
| | TCTTTCCTGGATTACATGCGTATCTGACTCGAGCACCACCACCACC |
| | ACCACTGAGATCCGGCTGCTAA |
| CODM | CGGTCGTCAGACTGTCGATGAAGCCCTGAAAGACGCGCAGACTGG |
| P4A + | ATCCATGGAAACCGCAATCCTGATCAAACTTGGCAACGGGCTCTCG |
| E259G + | ATCCCTAGCGTCCAAGAGCTCGCCAAGTTGACCCTGGCCGAGATC |
| M3601 | CCAAGTCGGTATACATGCACAGGTGAGAGCCCACTTAACAACATCG |
| (UMg25) | GTGCGTCAGTAACAGACGATGAAACGGTGCCGGTCATTGATTTGCA |
| SEQ ID | AAACTTATTAAGTCCAGAGCCAGTAGTGGGGAAATTAGAGTTGGAC |
| NO: 51 | AAGTTACACTCCGCTTGCAAAGAGTGGGGCTTCTTTCAGCTTGTCA |
| | ACCATGGCGTTGATGCCTTGTTAATGGACAACATTAAGAGCGAAAT |
| | CAAGGGCTTTTTTAACCTGCCGATGAATGAGAAGACCAAATACGGT |
| | CAGCAGGACGGCGACTTTGAAGGGTTCGGTCAGCCTTATATTGAAT |
| | CTGAGGATCAGCGCTTGGATTGGACTGAGGTGTTCTCAATGCTCTC |
| | GCTGCCACTTCACCTGCGCAAGCCGCACCTTTTTCCAGAACTTCCA |
| | CTTCCGTTTCGCGAGACCCTGGAGTCGTACTTGAGCAAGATGAAAA |
| | AACTGTCAACGGTGGTGTTTGAGATGTTAGAAAAGAGTTTGCAACTT |
| | GTTGAGATTAAAGGTATGACTGACTTGTTCGAAGACGGGCTCCAAA |
| | CGATGCGCATGAATTACTATCCTCCATGTCCACGGCCTGAGTTGGT |
| | ATTGGGTCTTACAAGTCATAGTGACTTTTCTGGGTTGACCATTTTAC |
| | TCCAGTTAAACGAAGTGGAGGGGTTGCAGATTCGGAAGGAAGGTC |
| | GGTGGATCAGCATCAAACCGCTTCCAGACGCCTTTATTGTCAACGT |
| | AGGTGATATTCTCGAAATTATGACCAACGGGATCTATCGTAGTGTTG |
| | AGCACCGTGCAGTCGTGAATAGTACCAAGGAGCGGCTTTCCATCGC |
| | CACATTCCATGACTCTAAATTGGAATCCGAAATCGGTCCTATCTCTT |
| | CGTTGGTTACTCCTGAGACCCCTGCATTATTCAAGCGCGGGCGCTA |
| | CGAAGACATTCTCAAGGAAAACCTTTCGCGCAAACTTGATGGCAAG |
| | TCTTTCCTGGATTACATGCGTATCTGACTCGAGCACCACCACCACC |
| | ACCACTGAGATCCGGCTGCTAA |
| CODM | CGGTCGTCAGACTGTCGATGAAGCCCTGAAAGACGCGCAGACTGG |
| P4A + 15K + | ATCCATGGAAACCGCAAAACTGATCAAACTTGGCAACGGGCTCTCG |
| E259G + | ATCCCTAGCGTCCAAGAGCTCGCCAAGTTGACCCTGGCCGAGATC |
| M3601 | CCAAGTCGGTATACATGCACAGGTGAGAGCCCACTTAACAACATCG |
| (UMg26) | GTGCGTCAGTAACAGACGATGAAACGGTGCCGGTCATTGATTTGCA |
| SEQ ID | AAACTTATTAAGTCCAGAGCCAGTAGTGGGGAAATTAGAGTTGGAC |
| NO: 52 | AAGTTACACTCCGCTTGCAAAGAGTGGGGCTTCTTTCAGCTTGTCA |
| | ACCATGGCGTTGATGCCTTGTTAATGGACAACATTAAGAGCGAAAT |
| | CAAGGGCTTTTTTAACCTGCCGATGAATGAGAAGACCAAATACGGT |
| | CAGCAGGACGGCGACTTTGAAGGGTTCGGTCAGCCTTATATTGAAT |
| | CTGAGGATCAGCGCTTGGATTGGACTGAGGTGTTCTCAATGCTCTC |
| | GCTGCCACTTCACCTGCGCAAGCCGCACCTTTTTCCAGAACTTCCA |
| | CTTCCGTTTCGCGAGACCCTGGAGTCGTACTTGAGCAAGATGAAAA |
| | AACTGTCAACGGTGGTGTTTGAGATGTTAGAAAAGAGTTTGCAACTT |
| | GTTGAGATTAAAGGTATGACTGACTTGTTCGAAGACGGGCTCCAAA |
| | CGATGCGCATGAATTACTATCCTCCATGTCCACGGCCTGAGTTGGT |
| | ATTGGGTCTTACAAGTCATAGTGACTTTTCTGGGTTGACCATTTTAC |
| | TCCAGTTAAACGAAGTGGAGGGGTTGCAGATTCGGAAGGAAGGTC |
| | GGTGGATCAGCATCAAACCGCTTCCAGACGCCTTTATTGTCAACGT |
| | AGGTGATATTCTCGAAATTATGACCAACGGGATCTATCGTAGTGTTG |
| | AGCACCGTGCAGTCGTGAATAGTACCAAGGAGCGGCTTTCCATCGC |
| | CACATTCCATGACTCTAAATTGGAATCCGAAATCGGTCCTATCTCTT |
| | CGTTGGTTACTCCTGAGACCCCTGCATTATTCAAGCGCGGGCGCTA |
| | CGAAGACATTCTCAAGGAAAACCTTTCGCGCAAACTTGATGGCAAG |
| | TCTTTCCTGGATTACATGCGTATCTGACTCGAGCACCACCACCACC |
| | ACCACTGAGATCCGGCTGCTAA |

TABLE 4
P. somniferum Open Reading Frames

| Name | Sequence |
|---|---|
| CODM WT | ATGGAGACACCAATACTTATCAAGCTAGGCAATGG |
| (P. somniferum | TTTGTCAATACCAAGTGTTCAGGAATTGGCTAAAC |
| optimization) | TCACGCTTGCAGAAATTCCATCTCGATACACATGC |
| SEQ ID | ACCGGTGAAAGCCCGTTGAATAATATTGGTGCGTC |
| NO: 14 | TGTAACAGATGATGAAACAGTTCCTGTCATCGATT |
| | TGCAAAATTTACTATCTCCAGAACCCGTAGTTGGA |
| | AAGTTAGAATTGGATAAGCTTCATTCTGCTTGCAA |
| | AGAATGGGGTTTCTTTCAGCTGGTTAACCATGGAG |
| | TCGACGCTTTACTGATGGACAATATAAAATCAGAA |
| | ATTAAAGGTTTCTTTAACCTTCCAATGAATGAGAA |
| | AACTAAATACGGACAGCAAGATGGAGATTTTGAAG |
| | GATTTGGACAACCCTATATTGAATCGGAGGACCAA |
| | AGACTTGATTGGACTGAAGTGTTTAGCATGTTAAG |
| | TCTTCCTCTCCATTTAAGGAAGCCTCATTTGTTTC |
| | CAGAACTCCCTCTGCCTTTCAGGGAGACACTGGAA |
| | TCCTACCTATCAAAAATGAAAAAACTATCAACGGT |
| | TGTCTTTGAGATGTTGGAAAAATCTCTACAATTAG |
| | TTGAGATTAAAGGTATGACAGACTTATTTGAAGAT |
| | GGGTTGCAAACAATGAGGATGAACTATTATCCTCC |
| | TTGTCCTCGACCAGAGCTTGTACTTGGTCTTACGT |
| | CACACTCGGATTTTAGCGGTTTGACAATTCTCCTT |
| | CAACTTAATGAAGTTGAAGGATTACAAATAAGAAA |
| | AGAAGAGAGGTGGATTTCAATCAAACCTCTACCTG |
| | ATGCGTTCATAGTGAATGTTGGAGACATTTTGGAG |
| | ATAATGACTAATGGGATTTACCGTAGCGTCGAGCA |
| | CCGGGCAGTAGTAAACTCAACAAAGGAGAGGCTCT |
| | CAATCGCGACATTTCATGACTCTAAACTAGAGTCA |
| | GAAATAGGCCCAATTTCGAGCTTGGTCACACCAGA |
| | GACACCTGCTTTGTTCAAAAGAGGTAGGTATGAGG |
| | ATATTTTGAAGGAAAATCTTTCAAGGAAGCTTGAT |
| | GGAAAATCATTTCTCGACTACATGAGGATGTGA |
| CODM | ATGGAGACACCAATACTTATCAAGCTAGGCAATGG |
| E259K | TTTGTCAATACCAAGTGTTCAGGAATTGGCTAAAC |
| (P. somniferum | TCACGCTTGCAGAAATTCCATCTCGATACACATGC |
| optimization) | ACCGGTGAAAGCCCGTTGAATAATATTGGTGCGTC |
| SEQ ID | TGTAACAGATGATGAAACAGTTCCTGTCATCGATT |
| NO: 15 | TGCAAAATTTACTATCTCCAGAACCCGTAGTTGGA |
| | AAGTTAGAATTGGATAAGCTTCATTCTGCTTGCAA |
| | AGAATGGGGTTTCTTTCAGCTGGTTAACCATGGAG |
| | TCGACGCTTTACTGATGGACAATATAAAATCAGAA |
| | ATTAAAGGTTTCTTTAACCTTCCAATGAATGAGAA |
| | AACTAAATACGGACAGCAAGATGGAGATTTTGAAG |
| | GATTTGGACAACCCTATATTGAATCGGAGGACCAA |
| | AGACTTGATTGGACTGAAGTGTTTAGCATGTTAAG |
| | TCTTCCTCTCCATTTAAGGAAGCCTCATTTGTTTC |
| | CAGAACTCCCTCTGCCTTTCAGGGAGACACTGGAA |
| | TCCTACCTATCAAAAATGAAAAAACTATCAACGGT |
| | TGTCTTTGAGATGTTGGAAAAATCTCTACAATTAG |
| | TTGAGATTAAAGGTATGACAGACTTATTTGAAGAT |
| | GGGTTGCAAACAATGAGGATGAACTATTATCCTCC |
| | TTGTCCTCGACCAGAGCTTGTACTTGGTCTTACGT |
| | CACACTCGGATTTTAGCGGTTTGACAATTCTCCTT |
| | CAACTTAATGAAGTTGAAGGATTACAAATAAGAAA |
| | AGAGAAGAGGTGGATTTCAATCAAACCTCTACCTG |
| | ATGCGTTCATAGTGAATGTTGGAGACATTTTGGAG |
| | ATAATGACTAATGGGATTTACCGTAGCGTCGAGCA |
| | CCGGGCAGTAGTAAACTCAACAAAGGAGAGGCTCT |
| | CAATCGCGACATTTCATGACTCTAAACTAGAGTCA |
| | GAAATAGGCCCAATTTCGAGCTTGGTCACACCAGA |
| | GACACCTGCTTTGTTCAAAAGAGGTAGGTATGAGG |
| | ATATTTTGAAGGAAAATCTTTCAAGGAAGCTTGAT |
| | GGAAAATCATTTCTCGACTACATGAGGATGTGA |
| T60DM | ATGGAGAAAGCAAAACTTATGAAGCTAGGTAATGG |
| SEQ ID | TATGGAAATACCAAGTGTTCAAGAATTGGCTAAAC |
| NO: 16 | TCACGCTTGCCGAAATTCCATCTCGATACGTATGC |
| | GCCAATGAAAACCTTTTGTTGCCTATGGGTGCATC |
| | TGTCATAAATGATCATGAAACCATTCCTGTCATCG |
| | ATATAGAAAATTTATTATCTCCAGAACCAATAATC |
| | GGAAAGTTAGAATTAGATAGGCTTCATTTTGCTTG |
| | CAAAGAATGGGGTTTTTTTCAGGTAGTGAACCATG |
| | GAGTCGACGCTTCATTGGTGGATAGTGTAAAATCA |
| | GAAATTCAAGGTTTCTTTAACCTTTCTATGGATGA |
| | GAAAACTAAATATGAACAGGAAGATGGAGATGTGG |
| | AAGGATTTGGACAAGGCTTTATTGAATCAGAGGAC |
| | CAAACACTTGATTGGGCAGATATATTTATGATGTT |
| | CACTCTTCCACTCCATTTAAGGAAGCCTCACTTAT |
| | TTTCAAAACTCCCAGTGCCTCTCAGGGAGACAATC |
| | GAATCCTACTCATCAGAAATGAAAAAGTTATCCAT |
| | GGTTCTCTTTAATAAGATGGAAAAAGCTCTACAAG |
| | TACAAGCAGCCGAGATTAAGGGTATGTCAGAGGTG |
| | TTTATAGATGGGACACAAGCAATGAGGATGAACTA |
| | TTATCCCCCTTGTCCTCAACCAAATCTCGCCATCG |
| | GTCTTACGTCGCACTCGGATTTTGGCGGTTTGACA |
| | ATCCTCCTTCAAATCAACGAAGTGGAAGGATTACA |
| | GATAAAAAGAGAGGGGACATGGATTTCAGTCAAAC |
| | CTCTACCTAATGCGTTCGTAGTGAATGTTGGAGAT |
| | ATTTTGGAGATAATGACTAATGGAATTTACCATAG |
| | TGTCGATCACCGGGCAGTAGTAAACTCAACAAATG |
| | AGAGGCTCTCAATCGCAACATTTCATGACCCTAGT |
| | CTAGAGTCGGTAATAGGCCCAATATCAAGCTTGAT |
| | TACTCCAGAGACACCTGCTTTGTTTAAAAGTGGAT |
| | CTACATATGGGGATCTTGTGGAGGAATGTAAAACA |
| | AGGAAGCTCGATGGAAAATCATTTCTTGACTCCAT |
| | GAGGATTTGA |
| NISO | ATGGACTCAGTATCAGCTGCTCTAGTATTTCATAG |
| SEQ ID | TTCCATATACTTGTGTGCAATGGCTCATCATGGTG |
| NO: 17 | TTTCAGGTCTAGTTGGGAAAATTGTAACTGAATTG |
| | GAGGTGAATTGTAATGCCGACGAATTTTATAAGAT |
| | TTTGAAGCGCGATGAAGATGTTCCACGGGCAGTTT |
| | CTGATCTTTTCCCTCCCGTCAAAATTGCCAAAGGA |
| | GATGGACTTGTTTCTGGTTGTATCAAGGAATGGGA |
| | CTGTGTTCTTGATGGTAAGGCGATGAGCGGCAAGG |
| | AGGAAACAACACACAACGATGAAACGAGGACTTTG |
| | CGTCACCGTGAATTGGAAGGAGACTTGATGAAGGA |
| | TTACAAGAAGTTTGATTCCATAATTGAAGTTAATC |
| | CAAAACCAAATGGACATGGAAGCATTGTGACGTGG |
| | TCAATTGAGTATGAGAAAATGAACGAAGATTCTCC |
| | GGCTCCCTTTGCTTATCTAGCTTCCTTCCATCAGA |
| | ACGTTGTGGAAGTTGATTCTCACCTCTGCCTTTCT |
| | GAATAA |
| COR1-4 | ATGGAGAGTAATGGTGTACCTATGATCACTCTCAG |
| SEQ ID | TTCCGGCATTCGGATGCCTGCTTTAGGTATGGGAA |
| NO: 18 | CAGCTGAAACAATGGTAAAAGGAACAGAAAGAGAG |
| | AAATTGGCGTTTTTGAAAGCGATAGAGGTCGGTTA |
| | CAGACACTTCGATACAGCTGCTGCATACCAAAGTG |
| | AAGAGTGTCTTGGTGAAGCTATAGCTGAAGCACTT |
| | CAACTTGGTTTAATAAAATCTCGAGATGAACTCTT |
| | CATCACTTCCAAGCTCTGGTGCGCTGATGCTCACG |
| | CTGATCTTGTCCTCCCTGCTCTTCAGAATTCTCTG |
| | AGGAATCTCAAATTGGAGTATCTTGATCTATATTT |
| | GATACACCATCCGGTAAGCTTGAAGCCAGGGAAAT |
| | TTGTTAACGAAATACCAAAGGATCATATTCTTCCA |
| | ATGGACTACAAATCTGTATGGGCAGCCATGGAAGA |
| | GTGTCAGACCCTTGGCTTCACTAGGGCAATCGGTG |
| | TCAGTAATTTCTCATGCAAAAAGCTTCAAGAGTTG |
| | ATGGCAGCAGCCAAGATCCCTCCAGTTGTGAATCA |
| | AGTGGAGATGAGCCCTACTTTACATCAAAAAAATC |
| | TGAGGGAATATTGCAAGGCCAATAATATCATGATC |
| | ACTGCACACTCGGTTTTGGGAGCCATAGGTGCTCC |
| | ATGGGGCAGCAATGCAGTTATGGATTCTAAGGTGC |
| | TTCACCAGATTGCTGTGGCAAGAGGAAAATCTGTT |
| | GCCCAGGTTAGTATGAGATGGGTTTACCAGCAAGG |
| | CGCGAGTCTTGTGGTGAAAAGTTTCAATGAAGGGA |
| | GGATGAAGGAAAACCTTAAGATATTTGATTGGGAA |
| | CTAACGGCAGAAGATATGGAAAAGATCAGTGAGAT |
| | TCCGCAATCTAGAACAAGCTCTGCTGCTTTCTTGT |
| | TATCACCGACTGGACCTTTCAAAACTGAAGAAGAG |
| | TTCTGGGATGAGAAGGATTGA |

TABLE 5
Protein sequences

| Name | Sequence |
|---|---|
| CODM WT | METPILIKLGNGLSIPSVQELAKLTLAEIPSRYTCTGESPLNNIG |
| SEQ ID | ASVTDDETVPVIDLQNLLSPEPVVGKLELDKLHSACKEWGFFQLV |
| NO: 19 | NHGVDALLMDNIKSEIKGFFNLPMNEKTKYGQQDGDFEGFGQPYI |
| | ESEDQRLDWTEVFSMLSLPLHLRKPHLFPELPLPFRETLESYLSK |
| | MKKLSTVVFEMLEKSLQLVEIKGMTDLFEDGLQTMRMNYYPPCPR |
| | PELVLGLTSHSDFSGLTILLQLNEVEGLQIRKEERWISIKPLPDA |
| | FIVNVGDILEIMTNGIYRSVEHRAVVNSTKERLSIATFHDSKLES |
| | EIGPISSLVTPETPALFKRGRYEDILKENLSRKLDGKSFLDYMRM |
| CODM | METPILIKLGNGLSIPSVQELAKLTLAEIPSRYTCTGESPLNNIG |
| E259K | ASVTDDETVPVIDLQNLLSPEPVVGKLELDKLHSACKEWGFFQLV |
| SEQ ID | NHGVDALLMDNIKSEIKGFFNLPMNEKTKYGQQDGDFEGFGQPYI |
| NO: 20 | ESEDQRLDWTEVFSMLSLPLHLRKPHLFPELPLPFRETLESYLSK |
| | MKKLSTVVFEMLEKSLQLVEIKGMTDLFEDGLQTMRMNYYPPCPR |
| | PELVLGLTSHSDFSGLTILLQLNEVEGLQIRKEKRWISIKPLPDA |
| | FIVNVGDILEIMTNGIYRSVEHRAVVNSTKERLSIATFHDSKLES |
| | EIGPISSLVTPETPALFKRGRYEDILKENLSRKLDGKSFLDYMRM |
| CODM | METPILIKLGNGLSIPSVQELAKLTLAEIPSRYTCTGESPLNNIG |
| E259D | ASVTDDETVPVIDLQNLLSPEPVVGKLELDKLHSACKEWGFFQLV |
| SEQ ID | NHGVDALLMDNIKSEIKGFFNLPMNEKTKYGQQDGDFEGFGQPYI |
| NO: 21 | ESEDQRLDWTEVFSMLSLPLHLRKPHLFPELPLPFRETLESYLSK |
| | MKKLSTVVFEMLEKSLQLVEIKGMTDLFEDGLQTMRMNYYPPCPR |
| | PELVLGLTSHSDFSGLTILLQLNEVEGLQIRKEDRWISIKPLPDA |
| | FIVNVGDILEIMTNGIYRSVEHRAVVNSTKERLSIATFHDSKLES |
| | EIGPISSLVTPETPALFKRGRYEDILKENLSRKLDGKSFLDYMRM |
| CODM | METPILIKLGNGLSIPSVQELAKLTLAEIPSRYTCTGESPLNNIG |
| E259H | ASVTDDETVPVIDLQNLLSPEPVVGKLELDKLHSACKEWGFFQLV |
| SEQ ID | NHGVDALLMDNIKSEIKGFFNLPMNEKTKYGQQDGDFEGFGQPYI |
| NO: 22 | ESEDQRLDWTEVFSMLSLPLHLRKPHLFPELPLPFRETLESYLSK |
| | MKKLSTVVFEMLEKSLQLVEIKGMTDLFEDGLQTMRMNYYPPCPR |
| | PELVLGLTSHSDFSGLTILLQLNEVEGLQIRKEHRWISIKPLPDA |
| | FIVNVGDILEIMTNGIYRSVEHRAVVNSTKERLSIATFHDSKLES |
| | EIGPISSLVTPETPALFKRGRYEDILKENLSRKLDGKSFLDYMRM |
| CODM | METPILIKLGNGLSIPSVQELAKLTLAEIPSRYTCTGESPLNNIG |
| E259Q | ASVTDDETVPVIDLQNLLSPEPVVGKLELDKLHSACKEWGFFQLV |
| SEQ ID | NHGVDALLMDNIKSEIKGFFNLPMNEKTKYGQQDGDFEGFGQPYI |
| NO: 23 | ESEDQRLDWTEVFSMLSLPLHLRKPHLFPELPLPFRETLESYLSK |
| | MKKLSTVVFEMLEKSLQLVEIKGMTDLFEDGLQTMRMNYYPPCPR |
| | PELVLGLTSHSDFSGLTILLQLNEVEGLQIRKEQRWISIKPLPDA |
| | FIVNVGDILEIMTNGIYRSVEHRAVVNSTKERLSIATFHDSKLES |
| | EIGPISSLVTPETPALFKRGRYEDILKENLSRKLDGKSFLDYMRM |
| CODM | METPILIKLGNGLSIPSVQELAKLTLAEIPSRYTCTGESPLNNIG |
| E259A | ASVTDDETVPVIDLQNLLSPEPVVGKLELDKLHSACKEWGFFQLV |
| SEQ ID | NHGVDALLMDNIKSEIKGFFNLPMNEKTKYGQQDGDFEGFGQPYI |
| NO: 24 | ESEDQRLDWTEVFSMLSLPLHLRKPHLFPELPLPFRETLESYLSK |
| | MKKLSTVVFEMLEKSLQLVEIKGMTDLFEDGLQTMRMNYYPPCPR |
| | PELVLGLTSHSDFSGLTILLQLNEVEGLQIRKEARWISIKPLPDA |
| | FIVNVGDILEIMTNGIYRSVEHRAVVNSTKERLSIATFHDSKLES |
| | EIGPISSLVTPETPALFKRGRYEDILKENLSRKLDGKSFLDYMRM |
| CODM | METPILIKLGNGLSIPSVQELAKLTLAEIPSRYTCTGESPLNNIG |
| E259S | ASVTDDETVPVIDLQNLLSPEPVVGKLELDKLHSACKEWGFFQLV |
| SEQ ID | NHGVDALLMDNIKSEIKGFFNLPMNEKTKYGQQDGDFEGFGQPYI |
| NO: 25 | ESEDQRLDWTEVFSMLSLPLHLRKPHLFPELPLPFRETLESYLSK |
| | MKKLSTVVFEMLEKSLQLVEIKGMTDLFEDGLQTMRMNYYPPCPR |
| | PELVLGLTSHSDFSGLTILLQLNEVEGLQIRKESRWISIKPLPDA |
| | FIVNVGDILEIMTNGIYRSVEHRAVVNSTKERLSIATFHDSKLES |
| | EIGPISSLVTPETPALFKRGRYEDILKENLSRKLDGKSFLDYMRM |
| CODM | METPILIKLGNGLSIPSVQELAKLTLAEIPSRYTCTGESPLNNIG |
| E259G | ASVTDDETVPVIDLQNLLSPEPVVGKLELDKLHSACKEWGFFQLV |
| SEQ ID | NHGVDALLMDNIKSEIKGFFNLPMNEKTKYGQQDGDFEGFGQPYI |
| NO: 26 | ESEDQRLDWTEVFSMLSLPLHLRKPHLFPELPLPFRETLESYLSK |
| | MKKLSTVVFEMLEKSLQLVEIKGMTDLFEDGLQTMRMNYYPPCPR |
| | PELVLGLTSHSDFSGLTILLQLNEVEGLQIRKEGRWISIKPLPDA |
| | FIVNVGDILEIMTNGIYRSVEHRAVVNSTKERLSIATFHDSKLES |
| | EIGPISSLVTPETPALFKRGRYEDILKENLSRKLDGKSFLDYMRM |
| CODM | METPILIKLGNGLSIPSVQELAKLTLAEIPSRYTCTGESPLNNIG |
| R260T | ASVTDDETVPVIDLQNLLSPEPVVGKLELDKLHSACKEWGFFQLV |
| SEQ ID | NHGVDALLMDNIKSEIKGFFNLPMNEKTKYGQQDGDFEGFGQPYI |
| NO: 27 | ESEDQRLDWTEVFSMLSLPLHLRKPHLFPELPLPFRETLESYLSK |
| | MKKLSTVVFEMLEKSLQLVEIKGMTDLFEDGLQTMRMNYYPPCPR |
| | PELVLGLTSHSDFSGLTILLQLNEVEGLQIRKEETWISIKPLPDA |
| | FIVNVGDILEIMTNGIYRSVEHRAVVNSTKERLSIATFHDSKLES |
| | EIGPISSLVTPETPALFKRGRYEDILKENLSRKLDGKSFLDYMRM |
| CODM | METPILIKLGNGLSIPSVQELAKLTLAEIPSRYTCTGESPLNNIG |
| E259G + | ASVTDDETVPVIDLQNLLSPEPVVGKLELDKLHSACKEWGFFQLV |
| R260T | NHGVDALLMDNIKSEIKGFFNLPMNEKTKYGQQDGDFEGFGQPYI |
| SEQ ID | ESEDQRLDWTEVFSMLSLPLHLRKPHLFPELPLPFRETLESYLSK |
| NO: 28 | MKKLSTVVFEMLEKSLQLVEIKGMTDLFEDGLQTMRMNYYPPCPR |
| | PELVLGLTSHSDFSGLTILLQLNEVEGLQIRKEGTWISIKPLPDA |
| | FIVNVGDILEIMTNGIYRSVEHRAVVNSTKERLSIATFHDSKLES |
| | EIGPISSLVTPETPALFKRGRYEDILKENLSRKLDGKSFLDYMRM |
| CODM | METPILIKLGNGLSIPSVQELAKLTLAEIPSRYTCTGESPLNNIG |
| R260K | ASVTDDETVPVIDLQNLLSPEPVVGKLELDKLHSACKEWGFFQLV |
| SEQ ID | NHGVDALLMDNIKSEIKGFFNLPMNEKTKYGQQDGDFEGFGQPYI |
| NO: 29 | ESEDQRLDWTEVFSMLSLPLHLRKPHLFPELPLPFRETLESYLSK |
| | MKKLSTVVFEMLEKSLQLVEIKGMTDLFEDGLQTMRMNYYPPCPR |
| | PELVLGLTSHSDFSGLTILLQLNEVEGLQIRKEEKWISIKPLPDA |
| | FIVNVGDILEIMTNGIYRSVEHRAVVNSTKERLSIATFHDSKLES |
| | EIGPISSLVTPETPALFKRGRYEDILKENLSRKLDGKSFLDYMRM |
| CODM | METPILIKLGNGLSIPSVQELAKLTLAEIPSRYTCTGESPLNNIG |
| E259D + | ASVTDDETVPVIDLQNLLSPEPVVGKLELDKLHSACKEWGFFQLV |
| R260K | NHGVDALLMDNIKSEIKGFFNLPMNEKTKYGQQDGDFEGFGQPYI |
| SEQ ID | ESEDQRLDWTEVFSMLSLPLHLRKPHLFPELPLPFRETLESYLSK |
| NO: 30 | MKKLSTVVFEMLEKSLQLVEIKGMTDLFEDGLQTMRMNYYPPCPR |
| | PELVLGLTSHSDFSGLTILLQLNEVEGLQIRKEDKWISIKPLPDA |
| | FIVNVGDILEIMTNGIYRSVEHRAVVNSTKERLSIATFHDSKLES |
| | EIGPISSLVTPETPALFKRGRYEDILKENLSRKLDGKSFLDYMRM |
| CODM | METPILIKLGNGLSIPSVQELAKLTLAEIPSRYTCTGESPLNNIG |
| E259G + | ASVTDDETVPVIDLQNLLSPEPVVGKLELDKLHSACKEWGFFQLV |
| R260K | NHGVDALLMDNIKSEIKGFFNLPMNEKTKYGQQDGDFEGFGQPYI |
| SEQ ID | ESEDQRLDWTEVFSMLSLPLHLRKPHLFPELPLPFRETLESYLSK |
| NO: 31 | MKKLSTVVFEMLEKSLQLVEIKGMTDLFEDGLQTMRMNYYPPCPR |
| | PELVLGLTSHSDFSGLTILLQLNEVEGLQIRKEGKWISIKPLPDA |
| | FIVNVGDILEIMTNGIYRSVEHRAVVNSTKERLSIATFHDSKLES |
| | EIGPISSLVTPETPALFKRGRYEDILKENLSRKLDGKSFLDYMRM |
| T60DM | MEKAKLMKLGNGMEIPSVQELAKLTLAEIPSRYVCANENLLLPMG |
| SEQ ID | ASVINDHETIPVIDIENLLSPEPIIGKLELDRLHFACKEWGFFQV |
| NO: 32 | VNHGVDASLVDSVKSEIQGFFNLSMDEKTKYEQEDGDVEGFGQGF |
| | IESEDQTLDWADIFMMFTLPLHLRKPHLFSKLPVPLRETIESYSS |
| | EMKKLSMVLFNKMEKALQVQAAEIKGMSEVFIDGTQAMRMNYYPP |
| | CPQPNLAIGLTSHSDFGGLTILLQINEVEGLQIKREGTWISVKPL |
| | PNAFVVNVGDILEIMTNGIYHSVDHRAVVNSTNERLSIATFHDPS |
| | LESVIGPISSLITPETPALFKSGSTYGDLVEECKTRKLDGKSFLD |
| | SMRI |
| NISO | MDSVSAALVFHSSIYLCAMAHHGVSGLVGKIVTELEVNCNADEFY |
| SEQ ID | KILKRDEDVPRAVSDLFPPVKIAKGDGLVSGCIKEWDCVLDGKAM |
| NO: 33 | SGKEETTHNDETRTLRHRELEGDLMKDYKKFDSIIEVNPKPNGHG |
| | SIVTWSIEYEKMNEDSPAPFAYLASFHQNVVEVDSHLCLSE |
| COR1-4 | MESNGVPMITLSSGIRMPALGMGTAETMVKGTEREKLAFLKAIEV |
| SEQ ID | GYRHFDTAAAYQSEECLGEAIAEALQLGLIKSRDELFITSKLWCA |
| NO: 34 | DAHADLVLPALQNSLRNLKLEYLDLYLIHHPVSLKPGKFVNEIPK |
| | DHILPMDYKSVWAAMEECQTLGFTRAIGVSNFSCKKLQELMAAAK |
| | IPPVVNQVEMSPTLHQKNLREYCKANNIMITAHSVLGAIGAPWGS |
| | NAVMDSKVLHQIAVARGKSVAQVSMRWVYQQGASLVVKSFNEGRM |
| | KENLKIFDWELTAEDMEKISEIPQSRTSSAAFLLSPTGPFKTEEE |
| | FWDEKD |
| CODM | METPILIKLGNGLSIPSVQELAKLTLAEIPSRYTCTGESPLNNIG |
| WT* | ASVTDDETVPVIDLQNLLSPEPVVGKLELDKLHSACKEWGFFQLV |
| SEQ ID | NHGVDALLMDNIKSEIKGFFNLPMNEKTKYGQQDGDFEGFGQPYI |
| NO: 53 | ESEDQRLDWTEVFSMLSLPLHLRKPHLFPELPLPFRETLESYLSK |
| | MKKLSTVVFEMLEKSLQLVEIKGMTDLFEDGLQTMRMNYYPPCPR |
| | PELVLGLTSHSDFSGLTILLQLNEVEGLQIRKEERWISIKPLPDA |
| | FIVNVGDILEIMTNGIYRSVEHRAVVNSTKERLSIATFHDSKLES |
| | EIGPISSLVTPETPALFKRGRYEDILKENLSRKLDGKSFLDYMRM |
| CODM | MEKAKLMKLGNGLSIPSVQELAKLTLAEIPSRYTCTGESPLNNIG |
| T3K + P4A | ASVTDDETVPVIDLQNLLSPEPVVGKLELDKLHSACKEWGFFQLV |
| + 15K + | NHGVDALLMDNIKSEIKGFFNLPMNEKTKYGQQDGDFEGFGQPYI |
| 17M | ESEDQRLDWTEVFSMLSLPLHLRKPHLFPELPLPFRETLESYLSK |
| SEQ ID | MKKLSTVVFEMLEKSLQLVEIKGMTDLFEDGLQTMRMNYYPPCPR |
| NO: 54 | PELVLGLTSHSDFSGLTILLQLNEVEGLQIRKEERWISIKPLPDA |
| | FIVNVGDILEIMTNGIYRSVEHRAVVNSTKERLSIATFHDSKLES |
| | EIGPISSLVTPETPALFKRGRYEDILKENLSRKLDGKSFLDYMRM |
| CODM | METPILIKLGNGLSIPSVQELAKLTLAEIPSRYTCTGESPLNNIG |
| Y357S + | ASVTDDETVPVIDLQNLLSPEPVVGKLELDKLHSACKEWGFFQLV |
| M3601 | NHGVDALLMDNIKSEIKGFFNLPMNEKTKYGQQDGDFEGFGQPYI |
| SEQ ID | ESEDQRLDWTEVFSMLSLPLHLRKPHLFPELPLPFRETLESYLSK |
| NO: 55 | MKKLSTVVFEMLEKSLQLVEIKGMTDLFEDGLQTMRMNYYPPCPR |
| | PELVLGLTSHSDFSGLTILLQLNEVEGLQIRKEERWISIKPLPDA |
| | FIVNVGDILEIMTNGIYRSVEHRAVVNSTKERLSIATFHDSKLES |
| | EIGPISSLVTPETPALFKRGRYEDILKENLSRKLDGKSFLDSMRI |
| CODM | MEKAKLMKLGNGLSIPSVQELAKLTLAEIPSRYTCTGESPLNNIG |
| T3K + P4A | ASVTDDETVPVIDLQNLLSPEPVVGKLELDKLHSACKEWGFFQLV |
| + 15K + | NHGVDALLMDNIKSEIKGFFNLPMNEKTKYGQQDGDFEGFGQPYI |
| 17M + | ESEDQRLDWTEVFSMLSLPLHLRKPHLFPELPLPFRETLESYLSK |
| Y357S + | MKKLSTVVFEMLEKSLQLVEIKGMTDLFEDGLQTMRMNYYPPCPR |
| M3601 | PELVLGLTSHSDFSGLTILLQLNEVEGLQIRKEERWISIKPLPDA |
| SEQ ID | FIVNVGDILEIMTNGIYRSVEHRAVVNSTKERLSIATFHDSKLES |
| NO: 56 | EIGPISSLVTPETPALFKRGRYEDILKENLSRKLDGKSFLDSMRI |
| CODM | MEKPILIKLGNGLSIPSVQELAKLTLAEIPSRYTCTGESPLNNIG |
| T3K | ASVTDDETVPVIDLQNLLSPEPVVGKLELDKLHSACKEWGFFQLV |
| SEQ ID | NHGVDALLMDNIKSEIKGFFNLPMNEKTKYGQQDGDFEGFGQPYI |
| NO: 57 | ESEDQRLDWTEVFSMLSLPLHLRKPHLFPELPLPFRETLESYLSK |
| | MKKLSTVVFEMLEKSLQLVEIKGMTDLFEDGLQTMRMNYYPPCPR |
| | PELVLGLTSHSDFSGLTILLQLNEVEGLQIRKEERWISIKPLPDA |
| | FIVNVGDILEIMTNGIYRSVEHRAVVNSTKERLSIATFHDSKLES |
| | EIGPISSLVTPETPALFKRGRYEDILKENLSRKLDGKSFLDYMRM |
| CODM | METAILIKLGNGLSIPSVQELAKLTLAEIPSRYTCTGESPLNNIG |
| P4A | ASVTDDETVPVIDLQNLLSPEPVVGKLELDKLHSACKEWGFFQLV |
| SEQ ID | NHGVDALLMDNIKSEIKGFFNLPMNEKTKYGQQDGDFEGFGQPYI |
| NO: 58 | ESEDQRLDWTEVFSMLSLPLHLRKPHLFPELPLPFRETLESYLSK |
| | MKKLSTVVFEMLEKSLQLVEIKGMTDLFEDGLQTMRMNYYPPCPR |
| | PELVLGLTSHSDFSGLTILLQLNEVEGLQIRKEERWISIKPLPDA |
| | FIVNVGDILEIMTNGIYRSVEHRAVVNSTKERLSIATFHDSKLES |
| | EIGPISSLVTPETPALFKRGRYEDILKENLSRKLDGKSFLDYMRM |
| CODM | METPKLIKLGNGLSIPSVQELAKLTLAEIPSRYTCTGESPLNNIG |
| 15K | ASVTDDETVPVIDLQNLLSPEPVVGKLELDKLHSACKEWGFFQLV |
| SEQ ID | NHGVDALLMDNIKSEIKGFFNLPMNEKTKYGQQDGDFEGFGQPYI |
| NO: 59 | ESEDQRLDWTEVFSMLSLPLHLRKPHLFPELPLPFRETLESYLSK |
| | MKKLSTVVFEMLEKSLQLVEIKGMTDLFEDGLQTMRMNYYPPCPR |
| | PELVLGLTSHSDFSGLTILLQLNEVEGLQIRKEERWISIKPLPDA |
| | FIVNVGDILEIMTNGIYRSVEHRAVVNSTKERLSIATFHDSKLES |
| | EIGPISSLVTPETPALFKRGRYEDILKENLSRKLDGKSFLDYMRM |
| CODM | METPILMKLGNGLSIPSVQELAKLTLAEIPSRYTCTGESPLNNIG |
| 17M | ASVTDDETVPVIDLQNLLSPEPVVGKLELDKLHSACKEWGFFQLV |
| SEQ ID | NHGVDALLMDNIKSEIKGFFNLPMNEKTKYGQQDGDFEGFGQPYI |
| NO: 60 | ESEDQRLDWTEVFSMLSLPLHLRKPHLFPELPLPFRETLESYLSK |
| | MKKLSTVVFEMLEKSLQLVEIKGMTDLFEDGLQTMRMNYYPPCPR |
| | PELVLGLTSHSDFSGLTILLQLNEVEGLQIRKEERWISIKPLPDA |
| | FIVNVGDILEIMTNGIYRSVEHRAVVNSTKERLSIATFHDSKLES |
| | EIGPISSLVTPETPALFKRGRYEDILKENLSRKLDGKSFLDYMRM |
| CODM | METPILIKLGNGLSIPSVQELAKLTLAEIPSRYTCTGESPLNNIG |
| Y357S | ASVTDDETVPVIDLQNLLSPEPVVGKLELDKLHSACKEWGFFQLV |
| SEQ ID | NHGVDALLMDNIKSEIKGFFNLPMNEKTKYGQQDGDFEGFGQPYI |
| NO: 61 | ESEDQRLDWTEVFSMLSLPLHLRKPHLFPELPLPFRETLESYLSK |
| | MKKLSTVVFEMLEKSLQLVEIKGMTDLFEDGLQTMRMNYYPPCPR |
| | PELVLGLTSHSDFSGLTILLQLNEVEGLQIRKEERWISIKPLPDA |
| | FIVNVGDILEIMTNGIYRSVEHRAVVNSTKERLSIATFHDSKLES |
| | EIGPISSLVTPETPALFKRGRYEDILKENLSRKLDGKSFLDSMRM |
| CODM | METPILIKLGNGLSIPSVQELAKLTLAEIPSRYTCTGESPLNNIG |
| M3601 | ASVTDDETVPVIDLQNLLSPEPVVGKLELDKLHSACKEWGFFQLV |
| SEQ ID | NHGVDALLMDNIKSEIKGFFNLPMNEKTKYGQQDGDFEGFGQPYI |
| NO: 62 | ESEDQRLDWTEVFSMLSLPLHLRKPHLFPELPLPFRETLESYLSK |
| | MKKLSTVVFEMLEKSLQLVEIKGMTDLFEDGLQTMRMNYYPPCPR |
| | PELVLGLTSHSDFSGLTILLQLNEVEGLQIRKEERWISIKPLPDA |
| | FIVNVGDILEIMTNGIYRSVEHRAVVNSTKERLSIATFHDSKLES |
| | EIGPISSLVTPETPALFKRGRYEDILKENLSRKLDGKSFLDYMRI |
| CODM | METPKLIKLGNGLSIPSVQELAKLTLAEIPSRYTCTGESPLNNIG |
| 15K + | ASVTDDETVPVIDLQNLLSPEPVVGKLELDKLHSACKEWGFFQLV |
| M3601 | NHGVDALLMDNIKSEIKGFFNLPMNEKTKYGQQDGDFEGFGQPYI |
| SEQ ID | ESEDQRLDWTEVFSMLSLPLHLRKPHLFPELPLPFRETLESYLSK |
| NO: 63 | MKKLSTVVFEMLEKSLQLVEIKGMTDLFEDGLQTMRMNYYPPCPR |
| | PELVLGLTSHSDFSGLTILLQLNEVEGLQIRKEERWISIKPLPDA |
| | FIVNVGDILEIMTNGIYRSVEHRAVVNSTKERLSIATFHDSKLES |
| | EIGPISSLVTPETPALFKRGRYEDILKENLSRKLDGKSFLDYMRI |
| CODM 15K | METPKLIKLGNGLSIPSVQELAKLTLAEIPSRYTCTGESPLNNIG |
| + E259G | ASVTDDETVPVIDLQNLLSPEPVVGKLELDKLHSACKEWGFFQLV |
| SEQ ID | NHGVDALLMDNIKSEIKGFFNLPMNEKTKYGQQDGDFEGFGQPYI |
| NO: 64 | ESEDQRLDWTEVFSMLSLPLHLRKPHLFPELPLPFRETLESYLSK |
| | MKKLSTVVFEMLEKSLQLVEIKGMTDLFEDGLQTMRMNYYPPCPR |
| | PELVLGLTSHSDFSGLTILLQLNEVEGLQIRKEGRWISIKPLPDA |
| | FIVNVGDILEIMTNGIYRSVEHRAVVNSTKERLSIATFHDSKLES |
| | EIGPISSLVTPETPALFKRGRYEDILKENLSRKLDGKSFLDYMRM |
| CODM | METPILIKLGNGLSIPSVQELAKLTLAEIPSRYTCTGESPLNNIG |
| E259G + | ASVTDDETVPVIDLQNLLSPEPVVGKLELDKLHSACKEWGFFQLV |
| M3601 | NHGVDALLMDNIKSEIKGFFNLPMNEKTKYGQQDGDFEGFGQPYI |
| SEQ ID | ESEDQRLDWTEVFSMLSLPLHLRKPHLFPELPLPFRETLESYLSK |
| NO: 65 | MKKLSTVVFEMLEKSLQLVEIKGMTDLFEDGLQTMRMNYYPPCPR |
| | PELVLGLTSHSDFSGLTILLQLNEVEGLQIRKEGRWISIKPLPDA |
| | FIVNVGDILEIMTNGIYRSVEHRAVVNSTKERLSIATFHDSKLES |
| | EIGPISSLVTPETPALFKRGRYEDILKENLSRKLDGKSFLDYMRI |
| CODM 15K | METPKLIKLGNGLSIPSVQELAKLTLAEIPSRYTCTGESPLNNIG |
| + E259G + | ASVTDDETVPVIDLQNLLSPEPVVGKLELDKLHSACKEWGFFQLV |
| M3601 | NHGVDALLMDNIKSEIKGFFNLPMNEKTKYGQQDGDFEGFGQPYI |
| SEQ ID | ESEDQRLDWTEVFSMLSLPLHLRKPHLFPELPLPFRETLESYLSK |
| NO: 66 | MKKLSTVVFEMLEKSLQLVEIKGMTDLFEDGLQTMRMNYYPPCPR |
| | PELVLGLTSHSDFSGLTILLQLNEVEGLQIRKEGRWISIKPLPDA |
| | FIVNVGDILEIMTNGIYRSVEHRAVVNSTKERLSIATFHDSKLES |
| | EIGPISSLVTPETPALFKRGRYEDILKENLSRKLDGKSFLDYMRI |
| CODM | METAILIKLGNGLSIPSVQELAKLTLAEIPSRYTCTGESPLNNIG |
| P4A + | ASVTDDETVPVIDLQNLLSPEPVVGKLELDKLHSACKEWGFFQLV |
| E259G + | NHGVDALLMDNIKSEIKGFFNLPMNEKTKYGQQDGDFEGFGQPYI |
| M3601 | ESEDQRLDWTEVFSMLSLPLHLRKPHLFPELPLPFRETLESYLSK |
| SEQ ID | MKKLSTVVFEMLEKSLQLVEIKGMTDLFEDGLQTMRMNYYPPCPR |
| NO: 67 | PELVLGLTSHSDFSGLTILLQLNEVEGLQIRKEGRWISIKPLPDA |
| | FIVNVGDILEIMTNGIYRSVEHRAVVNSTKERLSIATFHDSKLES |
| | EIGPISSLVTPETPALFKRGRYEDILKENLSRKLDGKSFLDYMRI |
| CODM | METAKLIKLGNGLSIPSVQELAKLTLAEIPSRYTCTGESPLNNIG |
| P4A + 15K | ASVTDDETVPVIDLQNLLSPEPVVGKLELDKLHSACKEWGFFQLV |
| + E259G + | NHGVDALLMDNIKSEIKGFFNLPMNEKTKYGQQDGDFEGFGQPYI |
| M3601 | ESEDQRLDWTEVFSMLSLPLHLRKPHLFPELPLPFRETLESYLSK |
| SEQ ID | MKKLSTVVFEMLEKSLQLVEIKGMTDLFEDGLQTMRMNYYPPCPR |
| NO: 68 | PELVLGLTSHSDFSGLTILLQLNEVEGLQIRKEGRWISIKPLPDA |
| | FIVNVGDILEIMTNGIYRSVEHRAVVNSTKERLSIATFHDSKLES |
| | EIGPISSLVTPETPALFKRGRYEDILKENLSRKLDGKSFLDYMRI |

1. A method for the biotransformation of one or more opiate alkaloids or synthetic opioid alkaloids or derivatives thereof comprising the steps:
forming a preparation comprising a host cell transformed with one or more nucleic acid molecules encoding one or more polypeptides capable of catalysing at least one reaction in the conversion of one or more opiate alkaloids or synthetic opioid alkaloids or derivatives thereof to one or more different opiate alkaloids or semi-synthetic opioid alkaloids or derivatives thereof,
incubating the reaction to allow transformation of one or more opiate alkaloids or semi-synthetic opioid alkaloids or derivatives thereof; and optionally
extracting said one or more transformed different opiate alkaloids or semi-synthetic opioid alkaloids or derivatives thereof from said preparation.

2. The method according to claim 1 wherein, said nucleic acid molecule comprises a nucleotide sequence selected from the group consisting of:
i) a nucleotide sequence as set forth in SEQ ID NO: 1, 2, 3, 4, 5, 6, 7, 8, 9, 10, 11, 12, 13, 14, 15, 37, 38, 39, 40, 41, 42, 43, 44, 45, 46, 47, 48, 49, 50, 51 or 52;
ii) a nucleotide sequence wherein said sequence is degenerate as a result of the genetic code to the nucleotide sequence defined in (i);
iii) a nucleic acid molecule comprising a nucleotide sequence the complementary strand of which hybridizes under stringent hybridization conditions to the sequence set forth in SEQ ID NO: 1, 2, 3, 4, 5, 6, 7, 8, 9, 10, 11, 12, 13, 14, 15, 37, 38, 39, 40, 41, 42, 43, 44, 45, 46, 47, 48, 49, 50, 51 or 52 wherein said nucleic acid molecule encodes a codeine 3-O-demethylase;
iv) a nucleotide sequence that encodes a polypeptide comprising an amino acid sequence as represented in SEQ ID NO: 19, 20, 21, 22, 23, 24, 25, 26, 27, 28, 29, 30, 31, 53, 54, 55, 56, 57, 58, 59, 60, 61, 62, 63, 64, 65, 66, 67 or 68; and
v) a nucleotide sequence that encodes a polypeptide comprising an amino acid sequence wherein said amino acid sequence is modified by addition deletion or substitution of at least one amino acid residue as represented in iv) above and which has codeine 3-O-demethylase activity.

3. The method according to claim 1, wherein:
said nucleotide sequence encoding a codeine 3-O-demethylase polypeptide is set forth in SEQ ID NO: 3 or comprising a nucleotide sequence that is at least 90% identical to SEQ ID NO: 3;
said nucleotide sequence encoding a codeine 3-O-demethylase polypeptide is set forth in SEQ ID NO: 8 or comprising a nucleotide sequence that is at least 90% identical to SEQ ID NO: 8;
said polypeptide comprises an amino acid sequence as set forth in SEQ ID NO: 21, or a polypeptide comprising the amino acid sequence that is at least 90% identical to SEQ ID NO: 21 and comprises the amino acid substitution E259D;
said polypeptide comprises an amino acid sequence as set forth in SEQ ID NO: 21, or a polypeptide comprising the amino acid sequence that is at least 90% identical to SEQ ID NO: 21 and comprises the amino acid substitution E259D;
said nucleotide sequence encoding a codeine 3-O-demethylase polypeptide is set forth in SEQ ID NO: 63 or comprising a nucleotide sequence that is at least 90% identical to SEQ ID NO: 63;
said nucleotide sequence encoding a codeine 3-O-demethylase polypeptide is set forth in SEQ ID NO: 59 or comprising a nucleotide sequence that is at least 90% identical to SEQ ID NO: 59;
said nucleotide sequence encoding a codeine 3-O-demethylase polypeptide is set forth in SEQ ID NO: 68 or comprising a nucleotide sequence that is at least 90% identical to SEQ ID NO: 68;
said nucleotide sequence encoding a codeine 3-O-demethylase polypeptide is set forth in SEQ ID NO: 67 or comprising a nucleotide sequence that is at least 90% identical to SEQ ID NO: 67;
said nucleotide sequence encoding a codeine 3-O-demethylase polypeptide is set forth in SEQ ID NO: 66 or comprising a nucleotide sequence that is at least 90% identical to SEQ ID NO: 66;
said polypeptide comprises an amino acid sequence as set forth in SEQ ID NO: 63, or a polypeptide comprising the amino acid sequence that is at least 90% identical to SEQ ID NO: 63 and comprises the amino acid substitution 15K and M360I;
said polypeptide comprises an amino acid sequence as set forth in SEQ ID NO: 59, or a polypeptide comprising the amino acid sequence that is at least 90% identical to SEQ ID NO: 59 and comprises the amino acid substitution 15K;
said polypeptide comprises an amino acid sequence as set forth in SEQ ID NO: 68, or a polypeptide comprising the amino acid sequence that is at least 90% identical to SEQ ID NO: 68 and comprises the amino acid substitution P4A, 15K, E259G and M360I;
said polypeptide comprises an amino acid sequence as set forth in SEQ ID NO: 67, or a polypeptide comprising the amino acid sequence that is at least 90% identical to SEQ ID NO: 67 and comprises the amino acid substitution P4A, E259G and M360I; and/or
said polypeptide comprises an amino acid sequence as set forth in SEQ ID NO: 66, or a polypeptide comprising the amino acid sequence that is at least 90% identical to SEQ ID NO: 66 and comprises the amino acid substitution 15K, E259G and M360I.

4-17. (canceled)

18. The method according to claim 1, wherein said nucleic acid molecule comprises a nucleotide sequence selected from the group consisting of:
i) a nucleotide sequence as set forth in SEQ ID NO: 16;
ii) a nucleotide sequence wherein said sequence is degenerate as a result of the genetic code to the nucleotide sequence defined in (i);
iii) a nucleic acid molecule comprising a nucleotide sequence the complementary strand of which hybridizes under stringent hybridization conditions to the sequence in SEQ ID NO: 16 wherein said nucleic acid molecule encodes a thebaine 6-O-demethylase;
iv) a nucleotide sequence that encodes a polypeptide comprising an amino acid sequence as represented in SEQ ID NO: 32; and
v) a nucleotide sequence that encodes a polypeptide comprising an amino acid sequence wherein said amino acid sequence is modified by addition deletion or substitution of at least one amino acid residue as represented in iv) above and which has thebaine 6-O-demethylase activity.

19. The method according to claim 1, wherein said nucleic acid molecule comprises a nucleotide sequence selected from the group consisting of:
i) a nucleotide sequence as set forth in SEQ ID NO: 18;
ii) a nucleotide sequence wherein said sequence is degenerate as a result of the genetic code to the nucleotide sequence defined in (i);
iii) a nucleic acid molecule comprising a nucleotide sequence the complementary strand of which hybridizes under stringent hybridization conditions to the sequence in SEQ ID NO: 18 wherein said nucleic acid molecule encodes a codeinone reductase;
iv) a nucleotide sequence that encodes a polypeptide comprising an amino acid sequence as represented in SEQ ID NO: 34; and
v) a nucleotide sequence that encodes a polypeptide comprising an amino acid sequence wherein said amino acid sequence is modified by addition deletion or substitution of at least one amino acid residue as represented in iv) above and which has codeinone reductase activity.

20. The method according to claim 1 wherein said nucleic acid molecule comprises a nucleotide sequence selected from the group consisting of:
i) a nucleotide sequence as set forth in SEQ ID NO: 17;
ii) a nucleotide sequence wherein said sequence is degenerate as a result of the genetic code to the nucleotide sequence defined in (i);
iii) a nucleic acid molecule comprising a nucleotide sequence the complementary strand of which hybridizes under stringent hybridization conditions to the sequence in SEQ ID NO: 17 wherein said nucleic acid molecule encodes a neopinone isomerase;
iv) a nucleotide sequence that encodes a polypeptide comprising an amino acid sequence as represented in SEQ ID NO: 33; and
v) a nucleotide sequence that encodes a polypeptide comprising an amino acid sequence wherein said amino acid sequence is modified by addition deletion or substitution of at least one amino acid residue as represented in iv) above and which has neopinone isomerase activity.

21-22. (canceled)

23. The method according to claim 1, wherein said opiate alkaloids are obtained from crude poppy extract and obtained from a Papaver plant.

24. The method according to claim 23 wherein said Papaver plant is modified, wherein the plant is:
deleted or mutated for one, two or three linked codeine 3-O-demethylase genes encoded by a nucleic acid molecule comprising the nucleotide sequence set forth in SEQ ID NO: 1 or 37, or a nucleic acid molecule comprising a nucleotide sequence that is 95-99% identical to the nucleotide sequence set forth in SEQ ID NO: 1 or 37; and/or
deleted or mutated for one, two, three, four or five linked thebaine 6-O-demethylase genes encoded by a nucleic acid molecule comprising the nucleotide sequence set forth in SEQ ID NO: 16, or a nucleic acid molecule comprising a nucleotide sequence that is 95-99% identical to the nucleotide sequence set forth in SEQ ID NO: 16.

25. The method according to claim 24 wherein:
said Papaver plant is deleted for each codeine 3-O-demethylase gene wherein codeine 3-O-demethylase activity is undetectable; and/or
said Papaver plant is deleted for each thebaine 6-O-demethylase gene wherein thebaine 6-O-demethylase activity is undetectable.

26-27. (canceled)

28. The method according to claim 24 wherein said Papaver plant is modified and comprises:
a genomic modification to one, two or three genes encoding codeine 3-O-demethylases,
a genomic modification to one, two, three, four or five genes encoding thebaine 6-O-demethylases,
wherein the expression of codeine 3-O-demethylases or the activity of codeine 3-O-demethylases is reduced or undetectable and further wherein the expression of said thebaine 6-O-demethylases or activity of thebaine 6-O-demethylases is reduced or undetectable wherein the modified plant has elevated levels of thebaine when compared to a wild type Papaver somniferum plant and comprising functional genes encoding codeine 3-O-demethylases and functional genes encoding thebaine 6-O-demethylase(s).

29. A modified codeine 3-O-demethylase polypeptide wherein the activity of said modified codeine 3-O-demethylase polypeptide is altered when compared to a non-modified codeine 3-O-demethylase.

30. The modified codeine 3-O-demethylase polypeptide according to claim 29 wherein:
said modification is to an amino acid sequence as set forth in SEQ ID NO: 19 wherein said polypeptide is modified by addition, deletion or substitution of at least one amino acid residue wherein said codeine 3-O-demethylase has altered activity;
said modified codeine 3-O-demethylase polypeptide is modified at amino acid position 259 and/or amino acid position 260 or comprising an amino acid sequence that is at least 90% identical to SEQ ID NO: 19 and comprises a modification to amino acid residue 259 and/or 260;
said modification is to an amino acid sequence as set forth in SEQ ID NO: 53 wherein said polypeptide is modified by addition, deletion or substitution of at least one amino acid residue wherein said codeine 3-O-demethylase has altered activity;
said modified codeine 3-O-demethylase polypeptide is modified at one or more amino acid positions selected from 3, 4, 5, 7, 259, 357 and/or 360, or combinations thereof, or comprising an amino acid sequence that is at least 90% identical to SEQ ID NO: 53 and comprises a modification to a codon for one or more amino acid residue positions selected from 3, 4, 5, 7, 259, 357 and/or 360, or combinations thereof; and/or
said modified codeine 3-O-demethylase polypeptide has enhanced activity when compared to a wild-type codeine 3-O-demethylase polypeptide as represented by the amino acid sequence set forth in SEQ ID NO: 19 or 53.

31-33. (canceled)

34. The modified codeine 3-O-demethylase polypeptide according to claim 29, wherein said modified codeine 3-O-demethylase polypeptide is selected from SEQ ID NO: 20, 21, 22, 23, 24, 25, 26, 27, 28, 29, 30, 31, 54, 55, 56, 57, 58, 59, 60, 61, 62, 63, 64, 65, 66, 67 or 68.

35-36. (canceled)

37. The codeine 3-O-demethylase polypeptide according to claim 29, wherein:
said modified codeine 3-O-demethylase polypeptide is represented by the amino acid sequence set forth in SEQ ID NO: 21;
said modified codeine 3-O-demethylase polypeptide is represented by the amino acid sequence set forth in SEQ ID NO: 26;
said modified codeine 3-O-demethylase polypeptide is represented by the amino acid sequence set forth in SEQ ID NO: 63;
said modified codeine 3-O-demethylase polypeptide is represented by the amino acid sequence set forth in SEQ ID NO: 59;
said modified codeine 3-O-demethylase polypeptide is represented by the amino acid sequence set forth in SEQ ID NO: 68;
said modified codeine 3-O-demethylase polypeptide is represented by the amino acid sequence set forth in SEQ ID NO: 67; or
said modified codeine 3-O-demethylase polypeptide is represented by the amino acid sequence set forth in SEQ ID NO: 66.

38-43. (canceled)

44. An isolated nucleic acid molecule comprising a nucleotide sequence encoding a modified codeine 3-O-demethylase polypeptide according to claim 29.

45. The isolated nucleic acid molecule according to claim 44 wherein said nucleic acid molecule comprises a nucleotide sequence as set forth in SEQ ID NO: 2, 3, 4, 5, 6, 7, 8, 9, 10, 11, 12, 13, 14 or 15 or comprising a nucleotide sequence that is at least 90% identical to SEQ ID NO: 2, 3, 4, 5, 6, 7, 8, 9, 10, 11, 12, 13, 14 or 15 and has modified codeine 3-O-demethylase activity.

46. The isolated nucleic acid molecule according to claim 45 wherein said nucleotide sequence encoding a modified codeine 3-O-demethylase polypeptide is set forth in SEQ ID NO: 8 or comprising a nucleotide sequence that is at least 90% identical to SEQ ID NO: 8 and comprises a modification to a codon for amino acid residue 259 and optionally amino acid residue 260.

47. The isolated nucleic acid molecule according to claim 46 wherein:
said nucleotide sequence encodes a modified codeine 3-O-demethylase polypeptide comprising an amino acid sequence as set forth in SEQ ID NO: 21, or a polypeptide comprising the amino acid sequence that is at least 90% identical to SEQ ID NO: 21 and comprises the amino acid substitution E259D; and/or
said nucleotide sequence encodes a modified codeine 3-O-demethylase polypeptide comprising an amino acid sequence as set forth in SEQ ID NO: 26 or a polypeptide comprising the amino acid sequence that is at least 90% identical to SEQ ID NO: 26 and comprises the amino acid substitution E259G.

48. (canceled)

49. The isolated nucleic acid molecule according to claim 44 wherein said nucleic acid molecule comprises a nucleotide sequence as set forth in SEQ ID NO: 38, 39, 40, 41, 42, 43, 44, 45, 46, 47, 48, 49, 50, 51 or 52 or comprising a nucleotide sequence that is at least 90% identical to SEQ ID NO: 38, 39, 40, 41, 42, 43, 44, 45, 46, 47, 48, 49, 50, 51 or 52 and has modified codeine 3-O-demethylase activity.

50. The isolated nucleic acid molecule according to claim 49 wherein:
said nucleotide sequence encoding a modified codeine 3-O-demethylase polypeptide is set forth in SEQ ID NO: 43 or comprising a nucleotide sequence that is at least 90% identical to SEQ ID NO: 43 and comprises one or more modifications to a codon for amino acid residue 5 and optionally amino acid residue 360, 259, 3, 7, 357 and/or 4;
said nucleotide sequence encoding a modified codeine 3-O-demethylase polypeptide is set forth in SEQ ID NO: 51 or comprising a nucleotide sequence that is at least 90% identical to SEQ ID NO: 51 and comprises one or more modifications to a codon for amino acid residue 4, 360, 259 and optionally amino acid residue 3, 7, 357 and/or 5;
said nucleotide sequence encodes a modified codeine 3-O-demethylase polypeptide comprising an amino acid sequence as set forth in SEQ ID NO: 59, or a polypeptide comprising the amino acid sequence that is at least 90% identical to SEQ ID NO: 59 and comprises the amino acid substitution 15K;
said nucleotide sequence encodes a modified codeine 3-O-demethylase polypeptide comprising an amino acid sequence as set forth in SEQ ID NO: 63 or a polypeptide comprising the amino acid sequence that is at least 90% identical to SEQ ID NO: 63 and comprises the amino acid substitution 15K and M360I;
said nucleotide sequence encodes a modified codeine 3-O-demethylase polypeptide comprising an amino acid sequence as set forth in SEQ ID NO: 66 or a polypeptide comprising the amino acid sequence that is at least 90% identical to SEQ ID NO: 66 and comprises the amino acid substitution 15K, E259G and M360I;
said nucleotide sequence encodes a modified codeine 3-O-demethylase polypeptide comprising an amino acid sequence as set forth in SEQ ID NO: 67 or a polypeptide comprising the amino acid sequence that is at least 90% identical to SEQ ID NO: 67 and comprises the amino acid substitution P4A, E259G and M360I; and/or
said nucleotide sequence encodes a modified codeine 3-O-demethylase polypeptide comprising an amino acid sequence as set forth in SEQ ID NO: 68 or a polypeptide comprising the amino acid sequence that is at least 90% identical to SEQ ID NO: 68 and comprises the amino acid substitution P4A, 15K, E259G and M360I.

51-56. (canceled)

57. An isolated nucleic acid molecule comprising a nucleotide sequence encoding a modified codeine 3-O-demethylase polypeptide, wherein said nucleic acid molecule comprises a nucleotide sequence wherein said nucleotide sequence is degenerate because of the genetic code and encodes a modified codeine 3-O-demethylase polypeptide according to claim 29.

58. An expression vector comprising a nucleic acid molecule according to claim 44.

59. A cell transformed with a nucleic acid molecule according to claim 44 or a vector comprising the nucleic acid molecule.

60. A process for the biotransformation of a first opiate, opioid alkaloid, or semi-synthetic opiate alkaloid to a second opiate, opioid alkaloid, or semi-synthetic opiate alkaloid comprising:
forming a preparation comprising a modified codeine 3-O-demethylase polypeptide according to claim 29 and a crude poppy extract or a purified or semi-purified source of selected opiate or opioid alkaloid; and
incubating the preparation to allow transformation of one or more opiate or opioid alkaloids; and optionally extracting said one or more transformed opiate or opioid alkaloids from said preparation.

61. The process according to claim 60 wherein said modified codeine 3-O-demethylase polypeptide is expressed by a cell transformed with a nucleic acid molecule encoding the modified codeine 3-O-demethylase polypeptide or a vector comprising the nucleic acid molecule.

62. The process according to claim 60, wherein:
said first opiate alkaloid is thebaine and said second opiate alkaloid is oripavine;
said first opiate alkaloid is codeine and said second opiate alkaloid is morphine;
said first opiate alkaloid is codeinone and said second opiate alkaloid is morphinone;
said first semi-synthetic opioid alkaloid is oxycodone and said second semi-synthetic opioid alkaloid is oxymorphone;
said first semi-synthetic opioid alkaloid is hydrocodone and said second semi-synthetic opioid alkaloid is hydromorphone;
said first semi-synthetic opioid alkaloid is dihydrocodeine and said second semi-synthetic opioid alkaloid is dihydromorphine;
said first semi-synthetic opioid alkaloid is 14-hydroxycodeine and said second semi-synthetic opioid alkaloid is 14-hydroxymorphine;
said first semi-synthetic opioid alkaloid is noroxycodone and said second semi-synthetic opioid alkaloid is noroxymorphone;
said first semi-synthetic opioid alkaloid is noroxycodeinone and said second semi-synthetic opioid alkaloid is noroxymorphinone;
said first semi-synthetic opioid alkaloid is 14-hydroxy norcodeinone and said second semi-synthetic opioid alkaloid is 14-hydroxy normorphinone;
said first semi-synthetic opioid alkaloid is 14-hydroxycodeinone and said second semi-synthetic opioid alkaloid is 14-hydroxymorphinone;
said first semi-synthetic opioid alkaloid is buprenorphine intermediate (N-cyclopropylmethyl-7α-(2-hydroxy-3,3-dimethyl-2-butyl)-6,14-endoethano-6,7,8,14-tetrahydronorthebaine) and said second semi-synthetic opioid alkaloid is buprenorphine ((2S)-2-[17-(cyclopropylmethyl)-4,5α-epoxy-3-hydroxy-6-methoxy-6α,14-ethano-14α-morphinan-7α-γl]-3,3-dimethylbutan-2-ol); or
said first semi-synthetic opioid alkaloid is buprenorphine intermediate (7-acetyl-6,14-endoetheno-6,7,8,14-tetrahydrothebaine) and said second semi-synthetic opioid alkaloid is etorphine intermediate.

63-74. (canceled)

The application's sequence listing, which the Patent Office published only in electronic form, follows.

SEQUENCE LISTING (92 sequences)

SEQ ID NO: 1 - DNA, 1148 bp, Papaver somniferum
cctgaaagacgcgcagactggatccatggagaccccaatcttgatcaaacttggcaacgggctctcgatccctagcgtccaagagctcgccaagttgaccctggccgagatcccaagtcggtatacatgcacaggtgagagcccacttaacaacatcggtgcgtcagtaacagacgatgaaacggtgccggtcattgatttgcaaaacttattaagtccagagccagtagtggggaaattagagttggacaagttacactccgcttgcaaagagtggggcttctttcagcttgtcaaccatggcgttgatgccttgttaatggacaacattaagagcgaaatcaagggcttttttaacctgccgatgaatgagaagaccaaatacggtcagcaggacggcgactttgaagggttcggtcagccttatattgaatctgaggatcagcgcttggattggactgaggtgttctcaatgctctcgctgccacttcacctgcgcaagccgcacctttttccagaacttccacttccgtttcgcgagaccctggagtcgtacttgagcaagatgaaaaaactgtcaacggtggtgtttgagatgttagaaaagagtttgcaacttgttgagattaaaggtatgactgacttgttcgaagacgggctccaaacgatgcgcatgaattactatcctccatgtccacggcctgagttggtattgggtcttacaagtcatagtgacttttctgggttgaccattttactccagttaaacgaagtggaggggttgcagattcggaaggaagagcggtggatcagcatcaaaccgcttccagacgcctttattgtcaacgtaggtgatattctcgaaattatgaccaacgggatctatcgtagtgttgagcaccgtgcagtcgtgaatagtaccaaggagcggctttccatcgccacattccatgactctaaattggaatccgaaatcggtcctatctcttcgttggttactcctgagacccctgcattattcaagcgcgggcgctacgaagacattctcaaggaaaacctttcgcgcaaacttgatggcaagtctttcctggattacatgcgcatgtgactcgagcaccaccaccaccaccactgagatccggctgcta

SEQ ID NO: 2 - DNA, 1083 bp, Papaver somniferum
atggagaccccaatcttgatcaaacttggcaacgggctctcgatccctagcgtccaagagctcgccaagttgaccctggccgagatcccaagtcggtatacatgcacaggtgagagcccacttaacaacatcggtgcgtcagtaacagacgatgaaacggtgccggtcattgatttgcaaaacttattaagtccagagccagtagtggggaaattagagttggacaagttacactccgcttgcaaagagtggggcttctttcagcttgtcaaccatggcgttgatgccttgttaatggacaacattaagagcgaaatcaagggcttttttaacctgccgatgaatgagaagaccaaatacggtcagcaggacggcgactttgaagggttcggtcagccttatattgaatctgaggatcagcgcttggattggactgaggtgttctcaatgctctcgctgccacttcacctgcgcaagccgcacctttttccagaacttccacttccgtttcgcgagaccctggagtcgtacttgagcaagatgaaaaaactgtcaacggtggtgtttgagatgttagaaaagagtttgcaacttgttgagattaaaggtatgactgacttgttcgaagacgggctccaaacgatgcgcatgaattactatcctccatgtccacggcctgagttggtattgggtcttacaagtcatagtgacttttctgggttgaccattttactccagttaaacgaagtggaggggttgcagattcggaaggaaaaacggtggatcagcatcaaaccgcttccagacgcctttattgtcaacgtaggtgatattctcgaaattatgaccaacgggatctatcgtagtgttgagcaccgtgcagtcgtgaatagtaccaaggagcggctttccatcgccacattccatgactctaaattggaatccgaaatcggtcctatctcttcgttggttactcctgagacccctgcattattcaagcgcgggcgctacgaagacattctcaaggaaaacctttcgcgcaaacttgatggcaagtctttcctggattacatgcgcatgtga

SEQ ID NO: 3 - DNA, 1083 bp, Papaver somniferum
atggagaccccaatcttgatcaaacttggcaacgggctctcgatccctagcgtccaagagctcgccaagttgaccctggccgagatcccaagtcggtatacatgcacaggtgagagcccacttaacaacatcggtgcgtcagtaacagacgatgaaacggtgccggtcattgatttgcaaaacttattaagtccagagccagtagtggggaaattagagttggacaagttacactccgcttgcaaagagtggggcttctttcagcttgtcaaccatggcgttgatgccttgttaatggacaacattaagagcgaaatcaagggcttttttaacctgccgatgaatgagaagaccaaatacggtcagcaggacggcgactttgaagggttcggtcagccttatattgaatctgaggatcagcgcttggattggactgaggtgttctcaatgctctcgctgccacttcacctgcgcaagccgcacctttttccagaacttccacttccgtttcgcgagaccctggagtcgtacttgagcaagatgaaaaaactgtcaacggtggtgtttgagatgttagaaaagagtttgcaacttgttgagattaaaggtatgactgacttgttcgaagacgggctccaaacgatgcgcatgaattactatcctccatgtccacggcctgagttggtattgggtcttacaagtcatagtgacttttctgggttgaccattttactccagttaaacgaagtggaggggttgcagattcggaaggaagaccggtggatcagcatcaaaccgcttccagacgcctttattgtcaacgtaggtgatattctcgaaattatgaccaacgggatctatcgtagtgttgagcaccgtgcagtcgtgaatagtaccaaggagcggctttccatcgccacattccatgactctaaattggaatccgaaatcggtcctatctcttcgttggttactcctgagacccctgcattattcaagcgcgggcgctacgaagacattctcaaggaaaacctttcgcgcaaacttgatggcaagtctttcctggattacatgcgcatgtga

SEQ ID NO: 4 - DNA, 1083 bp, Papaver somniferum
atggagaccccaatcttgatcaaacttggcaacgggctctcgatccctagcgtccaagagctcgccaagttgaccctggccgagatcccaagtcggtatacatgcacaggtgagagcccacttaacaacatcggtgcgtcagtaacagacgatgaaacggtgccggtcattgatttgcaaaacttattaagtccagagccagtagtggggaaattagagttggacaagttacactccgcttgcaaagagtggggcttctttcagcttgtcaaccatggcgttgatgccttgttaatggacaacattaagagcgaaatcaagggcttttttaacctgccgatgaatgagaagaccaaatacggtcagcaggacggcgactttgaagggttcggtcagccttatattgaatctgaggatcagcgcttggattggactgaggtgttctcaatgctctcgctgccacttcacctgcgcaagccgcacctttttccagaacttccacttccgtttcgcgagaccctggagtcgtacttgagcaagatgaaaaaactgtcaacggtggtgtttgagatgttagaaaagagtttgcaacttgttgagattaaaggtatgactgacttgttcgaagacgggctccaaacgatgcgcatgaattactatcctccatgtccacggcctgagttggtattgggtcttacaagtcatagtgacttttctgggttgaccattttactccagttaaacgaagtggaggggttgcagattcggaaggaacatcggtggatcagcatcaaaccgcttccagacgcctttattgtcaacgtaggtgatattctcgaaattatgaccaacgggatctatcgtagtgttgagcaccgtgcagtcgtgaatagtaccaaggagcggctttccatcgccacattccatgactctaaattggaatccgaaatcggtcctatctcttcgttggttactcctgagacccctgcattattcaagcgcgggcgctacgaagacattctcaaggaaaacctttcgcgcaaacttgatggcaagtctttcctggattacatgcgcatgtga

SEQ ID NO: 5 - DNA, 1083 bp, Papaver somniferum
atggagaccccaatcttgatcaaacttggcaacgggctctcgatccctagcgtccaagagctcgccaagttgaccctggccgagatcccaagtcggtatacatgcacaggtgagagcccacttaacaacatcggtgcgtcagtaacagacgatgaaacggtgccggtcattgatttgcaaaacttattaagtccagagccagtagtggggaaattagagttggacaagttacactccgcttgcaaagagtggggcttctttcagcttgtcaaccatggcgttgatgccttgttaatggacaacattaagagcgaaatcaagggcttttttaacctgccgatgaatgagaagaccaaatacggtcagcaggacggcgactttgaagggttcggtcagccttatattgaatctgaggatcagcgcttggattggactgaggtgttctcaatgctctcgctgccacttcacctgcgcaagccgcacctttttccagaacttccacttccgtttcgcgagaccctggagtcgtacttgagcaagatgaaaaaactgtcaacggtggtgtttgagatgttagaaaagagtttgcaacttgttgagattaaaggtatgactgacttgttcgaagacgggctccaaacgatgcgcatgaattactatcctccatgtccacggcctgagttggtattgggtcttacaagtcatagtgacttttctgggttgaccattttactccagttaaacgaagtggaggggttgcagattcggaaggaacaacggtggatcagcatcaaaccgcttccagacgcctttattgtcaacgtaggtgatattctcgaaattatgaccaacgggatctatcgtagtgttgagcaccgtgcagtcgtgaatagtaccaaggagcggctttccatcgccacattccatgactctaaattggaatccgaaatcggtcctatctcttcgttggttactcctgagacccctgcattattcaagcgcgggcgctacgaagacattctcaaggaaaacctttcgcgcaaacttgatggcaagtctttcctggattacatgcgcatgtga

SEQ ID NO: 6 - DNA, 1083 bp, Papaver somniferum
atggagaccccaatcttgatcaaacttggcaacgggctctcgatccctagcgtccaagagctcgccaagttgaccctggccgagatcccaagtcggtatacatgcacaggtgagagcccacttaacaacatcggtgcgtcagtaacagacgatgaaacggtgccggtcattgatttgcaaaacttattaagtccagagccagtagtggggaaattagagttggacaagttacactccgcttgcaaagagtggggcttctttcagcttgtcaaccatggcgttgatgccttgttaatggacaacattaagagcgaaatcaagggcttttttaacctgccgatgaatgagaagaccaaatacggtcagcaggacggcgactttgaagggttcggtcagccttatattgaatctgaggatcagcgcttggattggactgaggtgttctcaatgctctcgctgccacttcacctgcgcaagccgcacctttttccagaacttccacttccgtttcgcgagaccctggagtcgtacttgagcaagatgaaaaaactgtcaacggtggtgtttgagatgttagaaaagagtttgcaacttgttgagattaaaggtatgactgacttgttcgaagacgggctccaaacgatgcgcatgaattactatcctccatgtccacggcctgagttggtattgggtcttacaagtcatagtgacttttctgggttgaccattttactccagttaaacgaagtggaggggttgcagattcggaaggaagcacggtggatcagcatcaaaccgcttccagacgcctttattgtcaacgtaggtgatattctcgaaattatgaccaacgggatctatcgtagtgttgagcaccgtgcagtcgtgaatagtaccaaggagcggctttccatcgccacattccatgactctaaattggaatccgaaatcggtcctatctcttcgttggttactcctgagacccctgcattattcaagcgcgggcgctacgaagacattctcaaggaaaacctttcgcgcaaacttgatggcaagtctttcctggattacatgcgcatgtga

SEQ ID NO: 7 - DNA, 1083 bp, Papaver somniferum
atggagaccccaatcttgatcaaacttggcaacgggctctcgatccctagcgtccaagagctcgccaagttgaccctggccgagatcccaagtcggtatacatgcacaggtgagagcccacttaacaacatcggtgcgtcagtaacagacgatgaaacggtgccggtcattgatttgcaaaacttattaagtccagagccagtagtggggaaattagagttggacaagttacactccgcttgcaaagagtggggcttctttcagcttgtcaaccatggcgttgatgccttgttaatggacaacattaagagcgaaatcaagggcttttttaacctgccgatgaatgagaagaccaaatacggtcagcaggacggcgactttgaagggttcggtcagccttatattgaatctgaggatcagcgcttggattggactgaggtgttctcaatgctctcgctgccacttcacctgcgcaagccgcacctttttccagaacttccacttccgtttcgcgagaccctggagtcgtacttgagcaagatgaaaaaactgtcaacggtggtgtttgagatgttagaaaagagtttgcaacttgttgagattaaaggtatgactgacttgttcgaagacgggctccaaacgatgcgcatgaattactatcctccatgtccacggcctgagttggtattgggtcttacaagtcatagtgacttttctgggttgaccattttactccagttaaacgaagtggaggggttgcagattcggaaggaaagtcggtggatcagcatcaaaccgcttccagacgcctttattgtcaacgtaggtgatattctcgaaattatgaccaacgggatctatcgtagtgttgagcaccgtgcagtcgtgaatagtaccaaggagcggctttccatcgccacattccatgactctaaattggaatccgaaatcggtcctatctcttcgttggttactcctgagacccctgcattattcaagcgcgggcgctacgaagacattctcaaggaaaacctttcgcgcaaacttgatggcaagtctttcctggattacatgcgcatgtga

SEQ ID NO: 8 - DNA, 1083 bp, Papaver somniferum
atggagaccccaatcttgatcaaacttggcaacgggctctcgatccctagcgtccaagagctcgccaagttgaccctggccgagatcccaagtcggtatacatgcacaggtgagagcccacttaacaacatcggtgcgtcagtaacagacgatgaaacggtgccggtcattgatttgcaaaacttattaagtccagagccagtagtggggaaattagagttggacaagttacactccgcttgcaaagagtggggcttctttcagcttgtcaaccatggcgttgatgccttgttaatggacaacattaagagcgaaatcaagggcttttttaacctgccgatgaatgagaagaccaaatacggtcagcaggacggcgactttgaagggttcggtcagccttatattgaatctgaggatcagcgcttggattggactgaggtgttctcaatgctctcgctgccacttcacctgcgcaagccgcacctttttccagaacttccacttccgtttcgcgagaccctggagtcgtacttgagcaagatgaaaaaactgtcaacggtggtgtttgagatgttagaaaagagtttgcaacttgttgagattaaaggtatgactgacttgttcgaagacgggctccaaacgatgcgcatgaattactatcctccatgtccacggcctgagttggtattgggtcttacaagtcatagtgacttttctgggttgaccattttactccagttaaacgaagtggaggggttgcagattcggaaggaaggtcggtggatcagcatcaaaccgcttccagacgcctttattgtcaacgtaggtgatattctcgaaattatgaccaacgggatctatcgtagtgttgagcaccgtgcagtcgtgaatagtaccaaggagcggctttccatcgccacattccatgactctaaattggaatccgaaatcggtcctatctcttcgttggttactcctgagacccctgcattattcaagcgcgggcgctacgaagacattctcaaggaaaacctttcgcgcaaacttgatggcaagtctttcctggattacatgcgcatgtga

SEQ ID NO: 9 - DNA, 1083 bp, Papaver somniferum
atggagaccccaatcttgatcaaacttggcaacgggctctcgatccctagcgtccaagagctcgccaagttgaccctggccgagatcccaagtcggtatacatgcacaggtgagagcccacttaacaacatcggtgcgtcagtaacagacgatgaaacggtgccggtcattgatttgcaaaacttattaagtccagagccagtagtggggaaattagagttggacaagttacactccgcttgcaaagagtggggcttctttcagcttgtcaaccatggcgttgatgccttgttaatggacaacattaagagcgaaatcaagggcttttttaacctgccgatgaatgagaagaccaaatacggtcagcaggacggcgactttgaagggttcggtcagccttatattgaatctgaggatcagcgcttggattggactgaggtgttctcaatgctctcgctgccacttcacctgcgcaagccgcacctttttccagaacttccacttccgtttcgcgagaccctggagtcgtacttgagcaagatgaaaaaactgtcaacggtggtgtttgagatgttagaaaagagtttgcaacttgttgagattaaaggtatgactgacttgttcgaagacgggctccaaacgatgcgcatgaattactatcctccatgtccacggcctgagttggtattgggtcttacaagtcatagtgacttttctgggttgaccattttactccagttaaacgaagtggaggggttgcagattcggaaggaagagacgtggatcagcatcaaaccgcttccagacgcctttattgtcaacgtaggtgatattctcgaaattatgaccaacgggatctatcgtagtgttgagcaccgtgcagtcgtgaatagtaccaaggagcggctttccatcgccacattccatgactctaaattggaatccgaaatcggtcctatctcttcgttggttactcctgagacccctgcattattcaagcgcgggcgctacgaagacattctcaaggaaaacctttcgcgcaaacttgatggcaagtctttcctggattacatgcgcatgtga

SEQ ID NO: 10 - DNA, 1083 bp, Papaver somniferum
atggagaccccaatcttgatcaaacttggcaacgggctctcgatccctagcgtccaagagctcgccaagttgaccctggccgagatcccaagtcggtatacatgcacaggtgagagcccacttaacaacatcggtgcgtcagtaacagacgatgaaacggtgccggtcattgatttgcaaaacttattaagtccagagccagtagtggggaaattagagttggacaagttacactccgcttgcaaagagtggggcttctttcagcttgtcaaccatggcgttgatgccttgttaatggacaacattaagagcgaaatcaagggcttttttaacctgccgatgaatgagaagaccaaatacggtcagcaggacggcgactttgaagggttcggtcagccttatattgaatctgaggatcagcgcttggattggactgaggtgttctcaatgctctcgctgccacttcacctgcgcaagccgcacctttttccagaacttccacttccgtttcgcgagaccctggagtcgtacttgagcaagatgaaaaaactgtcaacggtggtgtttgagatgttagaaaagagtttgcaacttgttgagattaaaggtatgactgacttgttcgaagacgggctccaaacgatgcgcatgaattactatcctccatgtccacggcctgagttggtattgggtcttacaagtcatagtgacttttctgggttgaccattttactccagttaaacgaagtggaggggttgcagattcggaaggaaggtacgtggatcagcatcaaaccgcttccagacgcctttattgtcaacgtaggtgatattctcgaaattatgaccaacgggatctatcgtagtgttgagcaccgtgcagtcgtgaatagtaccaaggagcggctttccatcgccacattccatgactctaaattggaatccgaaatcggtcctatctcttcgttggttactcctgagacccctgcattattcaagcgcgggcgctacgaagacattctcaaggaaaacctttcgcgcaaacttgatggcaagtctttcctggattacatgcgcatgtga

SEQ ID NO: 11 - DNA, 1173 bp, Papaver somniferum
cggtcgtcagactgtcgatgaagccctgaaagacgcgcagactggatccatggagaccccaatcttgatcaaacttggcaacgggctctcgatccctagcgtccaagagctcgccaagttgaccctggccgagatcccaagtcggtatacatgcacaggtgagagcccacttaacaacatcggtgcgtcagtaacagacgatgaaacggtgccggtcattgatttgcaaaacttattaagtccagagccagtagtggggaaattagagttggacaagttacactccgcttgcaaagagtggggcttctttcagcttgtcaaccatggcgttgatgccttgttaatggacaacattaagagcgaaatcaagggcttttttaacctgccgatgaatgagaagaccaaatacggtcagcaggacggcgactttgaagggttcggtcagccttatattgaatctgaggatcagcgcttggattggactgaggtgttctcaatgctctcgctgccacttcacctgcgcaagccgcacctttttccagaacttccacttccgtttcgcgagaccctggagtcgtacttgagcaagatgaaaaaactgtcaacggtggtgtttgagatgttagaaaagagtttgcaacttgttgagattaaaggtatgactgacttgttcgaagacgggctccaaacgatgcgcatgaattactatcctccatgtccacggcctgagttggtattgggtcttacaagtcatagtgacttttctgggttgaccattttactccagttaaacgaagtggaggggttgcagattcggaaggaagagaaatggatcagcatcaaaccgcttccagacgcctttattgtcaacgtaggtgatattctcgaaattatgaccaacgggatctatcgtagtgttgagcaccgtgcagtcgtgaatagtaccaaggagcggctttccatcgccacattccatgactctaaattggaatccgaaatcggtcctatctcttcgttggttactcctgagacccctgcattattcaagcgcgggcgctacgaagacattctcaaggaaaacctttcgcgcaaacttgatggcaagtctttcctggattacatgcgcatgtgactcgagcaccaccaccaccaccactgagatccggctgctaa

SEQ ID NO: 12 - DNA, 1173 bp, Papaver somniferum
cggtcgtcagactgtcgatgaagccctgaaagacgcgcagactggatccatggagaccccaatcttgatcaaacttggcaacgggctctcgatccctagcgtccaagagctcgccaagttgaccctggccgagatcccaagtcggtatacatgcacaggtgagagcccacttaacaacatcggtgcgtcagtaacagacgatgaaacggtgccggtcattgatttgcaaaacttattaagtccagagccagtagtggggaaattagagttggacaagttacactccgcttgcaaagagtggggcttctttcagcttgtcaaccatggcgttgatgccttgttaatggacaacattaagagcgaaatcaagggcttttttaacctgccgatgaatgagaagaccaaatacggtcagcaggacggcgactttgaagggttcggtcagccttatattgaatctgaggatcagcgcttggattggactgaggtgttctcaatgctctcgctgccacttcacctgcgcaagccgcacctttttccagaacttccacttccgtttcgcgagaccctggagtcgtacttgagcaagatgaaaaaactgtcaacggtggtgtttgagatgttagaaaagagtttgcaacttgttgagattaaaggtatgactgacttgttcgaagacgggctccaaacgatgcgcatgaattactatcctccatgtccacggcctgagttggtattgggtcttacaagtcatagtgacttttctgggttgaccattttactccagttaaacgaagtggaggggttgcagattcggaaggaagacaaatggatcagcatcaaaccgcttccagacgcctttattgtcaacgtaggtgatattctcgaaattatgaccaacgggatctatcgtagtgttgagcaccgtgcagtcgtgaatagtaccaaggagcggctttccatcgccacattccatgactctaaattggaatccgaaatcggtcctatctcttcgttggttactcctgagacccctgcattattcaagcgcgggcgctacgaagacattctcaaggaaaacctttcgcgcaaacttgatggcaagtctttcctggattacatgcgcatgtgactcgagcaccaccaccaccaccactgagatccggctgctaa

SEQ ID NO: 13 - DNA, 1173 bp, Papaver somniferum
cggtcgtcagactgtcgatgaagccctgaaagacgcgcagactggatccatggagaccccaatcttgatcaaacttggcaacgggctctcgatccctagcgtccaagagctcgccaagttgaccctggccgagatcccaagtcggtatacatgcacaggtgagagcccacttaacaacatcggtgcgtcagtaacagacgatgaaacggtgccggtcattgatttgcaaaacttattaagtccagagccagtagtggggaaattagagttggacaagttacactccgcttgcaaagagtggggcttctttcagcttgtcaaccatggcgttgatgccttgttaatggacaacattaagagcgaaatcaagggcttttttaacctgccgatgaatgagaagaccaaatacggtcagcaggacggcgactttgaagggttcggtcagccttatattgaatctgaggatcagcgcttggattggactgaggtgttctcaatgctctcgctgccacttcacctgcgcaagccgcacctttttccagaacttccacttccgtttcgcgagaccctggagtcgtacttgagcaagatgaaaaaactgtcaacggtggtgtttgagatgttagaaaagagtttgcaacttgttgagattaaaggtatgactgacttgttcgaagacgggctccaaacgatgcgcatgaattactatcctccatgtccacggcctgagttggtattgggtcttacaagtcatagtgacttttctgggttgaccattttactccagttaaacgaagtggaggggttgcagattcggaaggaaggtaaatggatcagcatcaaaccgcttccagacgcctttattgtcaacgtaggtgatattctcgaaattatgaccaacgggatctatcgtagtgttgagcaccgtgcagtcgtgaatagtaccaaggagcggctttccatcgccacattccatgactctaaattggaatccgaaatcggtcctatctcttcgttggttactcctgagacccctgcattattcaagcgcgggcgctacgaagacattctcaaggaaaacctttcgcgcaaacttgatggcaagtctttcctggattacatgcgcatgtgactcgagcaccaccaccaccaccactgagatccggctgctaa

SEQ ID NO: 14 - DNA, 1083 bp, Papaver somniferum
atggagacaccaatacttatcaagctaggcaatggtttgtcaataccaagtgttcaggaattggctaaactcacgcttgcagaaattccatctcgatacacatgcaccggtgaaagcccgttgaataatattggtgcgtctgtaacagatgatgaaacagttcctgtcatcgatttgcaaaatttactatctccagaacccgtagttggaaagttagaattggataagcttcattctgcttgcaaagaatggggtttctttcagctggttaaccatggagtcgacgctttactgatggacaatataaaatcagaaattaaaggtttctttaaccttccaatgaatgagaaaactaaatacggacagcaagatggagattttgaaggatttggacaaccctatattgaatcggaggaccaaagacttgattggactgaagtgtttagcatgttaagtcttcctctccatttaaggaagcctcatttgtttccagaactccctctgcctttcagggagacactggaatcctacctatcaaaaatgaaaaaactatcaacggttgtctttgagatgttggaaaaatctctacaattagttgagattaaaggtatgacagacttatttgaagatgggttgcaaacaatgaggatgaactattatcctccttgtcctcgaccagagcttgtacttggtcttacgtcacactcggattttagcggtttgacaattctccttcaacttaatgaagttgaaggattacaaataagaaaagaagagaggtggatttcaatcaaacctctacctgatgcgttcatagtgaatgttggagacattttggagataatgactaatgggatttaccgtagcgtcgagcaccgggcagtagtaaactcaacaaaggagaggctctcaatcgcgacatttcatgactctaaactagagtcagaaataggcccaatttcgagcttggtcacaccagagacacctgctttgttcaaaagaggtaggtatgaggatattttgaaggaaaatctttcaaggaagcttgatggaaaatcatttctcgactacatgaggatgtga

SEQ ID NO: 15 - DNA, 1083 bp, Papaver somniferum
atggagacaccaatacttatcaagctaggcaatggtttgtcaataccaagtgttcaggaattggctaaactcacgcttgcagaaattccatctcgatacacatgcaccggtgaaagcccgttgaataatattggtgcgtctgtaacagatgatgaaacagttcctgtcatcgatttgcaaaatttactatctccagaacccgtagttggaaagttagaattggataagcttcattctgcttgcaaagaatggggtttctttcagctggttaaccatggagtcgacgctttactgatggacaatataaaatcagaaattaaaggtttctttaaccttccaatgaatgagaaaactaaatacggacagcaagatggagattttgaaggatttggacaaccctatattgaatcggaggaccaaagacttgattggactgaagtgtttagcatgttaagtcttcctctccatttaaggaagcctcatttgtttccagaactccctctgcctttcagggagacactggaatcctacctatcaaaaatgaaaaaactatcaacggttgtctttgagatgttggaaaaatctctacaattagttgagattaaaggtatgacagacttatttgaagatgggttgcaaacaatgaggatgaactattatcctccttgtcctcgaccagagcttgtacttggtcttacgtcacactcggattttagcggtttgacaattctccttcaacttaatgaagttgaaggattacaaataagaaaagagaagaggtggatttcaatcaaacctctacctgatgcgttcatagtgaatgttggagacattttggagataatgactaatgggatttaccgtagcgtcgagcaccgggcagtagtaaactcaacaaaggagaggctctcaatcgcgacatttcatgactctaaactagagtcagaaataggcccaatttcgagcttggtcacaccagagacacctgctttgttcaaaagaggtaggtatgaggatattttgaaggaaaatctttcaaggaagcttgatggaaaatcatttctcgactacatgaggatgtga

SEQ ID NO: 16 - DNA, 1095 bp, Papaver somniferum
atggagaaagcaaaacttatgaagctaggtaatggtatggaaataccaagtgttcaagaattggctaaactcacgcttgccgaaattccatctcgatacgtatgcgccaatgaaaaccttttgttgcctatgggtgcatctgtcataaatgatcatgaaaccattcctgtcatcgatatagaaaatttattatctccagaaccaataatcggaaagttagaattagataggcttcattttgcttgcaaagaatggggtttttttcaggtagtgaaccatggagtcgacgcttcattggtggatagtgtaaaatcagaaattcaaggtttctttaacctttctatggatgagaaaactaaatatgaacaggaagatggagatgtggaaggatttggacaaggctttattgaatcagaggaccaaacacttgattgggcagatatatttatgatgttcactcttccactccatttaaggaagcctcacttattttcaaaactcccagtgcctctcagggagacaatcgaatcctactcatcagaaatgaaaaagttatccatggttctctttaataagatggaaaaagctctacaagtacaagcagccgagattaagggtatgtcagaggtgtttatagatgggacacaagcaatgaggatgaactattatcccccttgtcctcaaccaaatctcgccatcggtcttacgtcgcactcggattttggcggtttgacaatcctccttcaaatcaacgaagtggaaggattacagataaaaagagaggggacatggattgcagtcaaacctctacctaatgcgttcgtagtgaatgttggagatattttggagataatgactaatggaatttaccatagtgtcgatcaccgggcagtagtaaactcaacaaatgagaggctctcaatcgcaacatttcatgaccctagtctagagtcggtaataggcccaatatcaagcttgattactccagagacacctgctttgtttaaaagtggatctacatatggggatcttgtggaggaatgtaaaacaaggaagctcgatggaaaatcatttcttgactccatgaggatttga

SEQ ID NO: 17 - DNA, 531 bp, Papaver somniferum
atggactcagtatcagctgctctagtatttcatagttccatatacttgtgtgcaatggctcatcatggtgtttcaggtctagttgggaaaattgtaactgaattggaggtgaattgtaatgccgacgaattttataagattttgaagcgcgatgaagatgttccacgggcagtttctgatcttttccctcccgtcaaaattgccaaaggagatggacttgtttctggttgtatcaaggaatgggactgtgttcttgatggtaaggcgatgagcggcaaggaggaaacaacacacaacgatgaaacgaggactttgcgtcaccgtgaattggaaggagacttgatgaaggattacaagaagtttgattccataattgaagttaatccaaaaccaaatggacatggaagcattgtgacgtggtcaattgagtatgagaaaatgaacgaagattctccggctccctttgcttatctagcttccttccatcagaacgttgtggaagttgattctcacctctgcctttctgaataa

SEQ ID NO: 18 - DNA, 966 bp, Papaver somniferum
atggagagtaatggtgtacctatgatcactctcagttccggcattcggatgcctgctttaggtatgggaacagctgaaacaatggtaaaaggaacagaaagagagaaattggcgtttttgaaagcgatagaggtcggttacagacacttcgatacagctgctgcataccaaagtgaagagtgtcttggtgaagctatagctgaagcacttcaacttggtttaataaaatctcgagatgaactcttcatcacttccaagctctggtgcgctgatgctcacgctgatcttgtcctccctgctcttcagaattctctgaggaatctcaaattggagtatcttgatctatatttgatacaccatccggtaagcttgaagccagggaaatttgttaacgaaataccaaaggatcatattcttccaatggactacaaaactgtatgggcagccatggaagagtgtcagacccttggcttcactagggcaatcggtgtcagtaatttctcatgcaaaaagcttcaagagttgatggcagcagccaagatccctccagttgtgaatcaagtggagatgagccctactttacatcaaaaaaatctgagggaatattgcaaggccaataatatcatgatcactgcacactcggttttgggagccataggtgctccatggggcagcaatgcagttatggattctaaggtgcttcaccagattgctgtggcaagaggaaaatctgttgcccaggttagtatgagatgggtttaccagcaaggcgcgagtctagtggtgaaaagtttcaatgaagggaggatgaaggaaaaccttaagatatttgattgggaactaacggcagaagatatggaaaagatcagtgagattccgcaatctagaacaagctctgctgatttcttgttatcaccgactggacctttcaaaactgaagaagagttctgggatgagaaggattga

SEQ ID NO: 19 - protein, 360 aa, Papaver somniferum
METPILIKLGNGLSIPSVQELAKLTLAEIPSRYTCTGESPLNNIGASVTDDETVPVIDLQNLLSPEPVVGKLELDKLHSACKEWGFFQLVNHGVDALLMDNIKSEIKGFFNLPMNEKTKYGQQDGDFEGFGQPYIESEDQRLDWTEVFSMLSLPLHLRKPHLFPELPLPFRETLESYLSKMKKLSTVVFEMLEKSLQLVEIKGMTDLFEDGLQTMRMNYYPPCPRPELVLGLTSHSDFSGLTILLQLNEVEGLQIRKEERWISIKPLPDAFIVNVGDILEIMTNGIYRSVEHRAVVNSTKERLSIATFHDSKLESEIGPISSLVTPETPALFKRGRYEDILKENLSRKLDGKSFLDYMRM

SEQ ID NO: 20 - protein, 360 aa, Papaver somniferum
METPILIKLGNGLSIPSVQELAKLTLAEIPSRYTCTGESPLNNIGASVTDDETVPVIDLQNLLSPEPVVGKLELDKLHSACKEWGFFQLVNHGVDALLMDNIKSEIKGFFNLPMNEKTKYGQQDGDFEGFGQPYIESEDQRLDWTEVFSMLSLPLHLRKPHLFPELPLPFRETLESYLSKMKKLSTVVFEMLEKSLQLVEIKGMTDLFEDGLQTMRMNYYPPCPRPELVLGLTSHSDFSGLTILLQLNEVEGLQIRKEKRWISIKPLPDAFIVNVGDILEIMTNGIYRSVEHRAVVNSTKERLSIATFHDSKLESEIGPISSLVTPETPALFKRGRYEDILKENLSRKLDGKSFLDYMRM

SEQ ID NO: 21 - protein, 360 aa, Papaver somniferum
METPILIKLGNGLSIPSVQELAKLTLAEIPSRYTCTGESPLNNIGASVTDDETVPVIDLQNLLSPEPVVGKLELDKLHSACKEWGFFQLVNHGVDALLMDNIKSEIKGFFNLPMNEKTKYGQQDGDFEGFGQPYIESEDQRLDWTEVFSMLSLPLHLRKPHLFPELPLPFRETLESYLSKMKKLSTVVFEMLEKSLQLVEIKGMTDLFEDGLQTMRMNYYPPCPRPELVLGLTSHSDFSGLTILLQLNEVEGLQIRKEDRWISIKPLPDAFIVNVGDILEIMTNGIYRSVEHRAVVNSTKERLSIATFHDSKLESEIGPISSLVTPETPALFKRGRYEDILKENLSRKLDGKSFLDYMRM

SEQ ID NO: 22 - protein, 360 aa, Papaver somniferum
METPILIKLGNGLSIPSVQELAKLTLAEIPSRYTCTGESPLNNIGASVTDDETVPVIDLQNLLSPEPVVGKLELDKLHSACKEWGFFQLVNHGVDALLMDNIKSEIKGFFNLPMNEKTKYGQQDGDFEGFGQPYIESEDQRLDWTEVFSMLSLPLHLRKPHLFPELPLPFRETLESYLSKMKKLSTVVFEMLEKSLQLVEIKGMTDLFEDGLQTMRMNYYPPCPRPELVLGLTSHSDFSGLTILLQLNEVEGLQIRKEHRWISIKPLPDAFIVNVGDILEIMTNGIYRSVEHRAVVNSTKERLSIATFHDSKLESEIGPISSLVTPETPALFKRGRYEDILKENLSRKLDGKSFLDYMRM

SEQ ID NO: 23 - protein, 360 aa, Papaver somniferum
METPILIKLGNGLSIPSVQELAKLTLAEIPSRYTCTGESPLNNIGASVTDDETVPVIDLQNLLSPEPVVGKLELDKLHSACKEWGFFQLVNHGVDALLMDNIKSEIKGFFNLPMNEKTKYGQQDGDFEGFGQPYIESEDQRLDWTEVFSMLSLPLHLRKPHLFPELPLPFRETLESYLSKMKKLSTVVFEMLEKSLQLVEIKGMTDLFEDGLQTMRMNYYPPCPRPELVLGLTSHSDFSGLTILLQLNEVEGLQIRKEQRWISIKPLPDAFIVNVGDILEIMTNGIYRSVEHRAVVNSTKERLSIATFHDSKLESEIGPISSLVTPETPALFKRGRYEDILKENLSRKLDGKSFLDYMRM

SEQ ID NO: 24 - protein, 360 aa, Papaver somniferum
METPILIKLGNGLSIPSVQELAKLTLAEIPSRYTCTGESPLNNIGASVTDDETVPVIDLQNLLSPEPVVGKLELDKLHSACKEWGFFQLVNHGVDALLMDNIKSEIKGFFNLPMNEKTKYGQQDGDFEGFGQPYIESEDQRLDWTEVFSMLSLPLHLRKPHLFPELPLPFRETLESYLSKMKKLSTVVFEMLEKSLQLVEIKGMTDLFEDGLQTMRMNYYPPCPRPELVLGLTSHSDFSGLTILLQLNEVEGLQIRKEARWISIKPLPDAFIVNVGDILEIMTNGIYRSVEHRAVVNSTKERLSIATFHDSKLESEIGPISSLVTPETPALFKRGRYEDILKENLSRKLDGKSFLDYMRM

SEQ ID NO: 25 - protein, 360 aa, Papaver somniferum
METPILIKLGNGLSIPSVQELAKLTLAEIPSRYTCTGESPLNNIGASVTDDETVPVIDLQNLLSPEPVVGKLELDKLHSACKEWGFFQLVNHGVDALLMDNIKSEIKGFFNLPMNEKTKYGQQDGDFEGFGQPYIESEDQRLDWTEVFSMLSLPLHLRKPHLFPELPLPFRETLESYLSKMKKLSTVVFEMLEKSLQLVEIKGMTDLFEDGLQTMRMNYYPPCPRPELVLGLTSHSDFSGLTILLQLNEVEGLQIRKESRWISIKPLPDAFIVNVGDILEIMTNGIYRSVEHRAVVNSTKERLSIATFHDSKLESEIGPISSLVTPETPALFKRGRYEDILKENLSRKLDGKSFLDYMRM

SEQ ID NO: 26 - protein, 360 aa, Papaver somniferum
METPILIKLGNGLSIPSVQELAKLTLAEIPSRYTCTGESPLNNIGASVTDDETVPVIDLQNLLSPEPVVGKLELDKLHSACKEWGFFQLVNHGVDALLMDNIKSEIKGFFNLPMNEKTKYGQQDGDFEGFGQPYIESEDQRLDWTEVFSMLSLPLHLRKPHLFPELPLPFRETLESYLSKMKKLSTVVFEMLEKSLQLVEIKGMTDLFEDGLQTMRMNYYPPCPRPELVLGLTSHSDFSGLTILLQLNEVEGLQIRKEGRWISIKPLPDAFIVNVGDILEIMTNGIYRSVEHRAVVNSTKERLSIATFHDSKLESEIGPISSLVTPETPALFKRGRYEDILKENLSRKLDGKSFLDYMRM

SEQ ID NO: 27 - protein, 360 aa, Papaver somniferum
METPILIKLGNGLSIPSVQELAKLTLAEIPSRYTCTGESPLNNIGASVTDDETVPVIDLQNLLSPEPVVGKLELDKLHSACKEWGFFQLVNHGVDALLMDNIKSEIKGFFNLPMNEKTKYGQQDGDFEGFGQPYIESEDQRLDWTEVFSMLSLPLHLRKPHLFPELPLPFRETLESYLSKMKKLSTVVFEMLEKSLQLVEIKGMTDLFEDGLQTMRMNYYPPCPRPELVLGLTSHSDFSGLTILLQLNEVEGLQIRKEETWISIKPLPDAFIVNVGDILEIMTNGIYRSVEHRAVVNSTKERLSIATFHDSKLESEIGPISSLVTPETPALFKRGRYEDILKENLSRKLDGKSFLDYMRM

SEQ ID NO: 28 - protein, 360 aa, Papaver somniferum
METPILIKLGNGLSIPSVQELAKLTLAEIPSRYTCTGESPLNNIGASVTDDETVPVIDLQNLLSPEPVVGKLELDKLHSACKEWGFFQLVNHGVDALLMDNIKSEIKGFFNLPMNEKTKYGQQDGDFEGFGQPYIESEDQRLDWTEVFSMLSLPLHLRKPHLFPELPLPFRETLESYLSKMKKLSTVVFEMLEKSLQLVEIKGMTDLFEDGLQTMRMNYYPPCPRPELVLGLTSHSDFSGLTILLQLNEVEGLQIRKEGTWISIKPLPDAFIVNVGDILEIMTNGIYRSVEHRAVVNSTKERLSIATFHDSKLESEIGPISSLVTPETPALFKRGRYEDILKENLSRKLDGKSFLDYMRM

SEQ ID NO: 29 - protein, 360 aa, Papaver somniferum
METPILIKLGNGLSIPSVQELAKLTLAEIPSRYTCTGESPLNNIGASVTDDETVPVIDLQNLLSPEPVVGKLELDKLHSACKEWGFFQLVNHGVDALLMDNIKSEIKGFFNLPMNEKTKYGQQDGDFEGFGQPYIESEDQRLDWTEVFSMLSLPLHLRKPHLFPELPLPFRETLESYLSKMKKLSTVVFEMLEKSLQLVEIKGMTDLFEDGLQTMRMNYYPPCPRPELVLGLTSHSDFSGLTILLQLNEVEGLQIRKEEKWISIKPLPDAFIVNVGDILEIMTNGIYRSVEHRAVVNSTKERLSIATFHDSKLESEIGPISSLVTPETPALFKRGRYEDILKENLSRKLDGKSFLDYMRM

SEQ ID NO: 30 - protein, 360 aa, Papaver somniferum
METPILIKLGNGLSIPSVQELAKLTLAEIPSRYTCTGESPLNNIGASVTDDETVPVIDLQNLLSPEPVVGKLELDKLHSACKEWGFFQLVNHGVDALLMDNIKSEIKGFFNLPMNEKTKYGQQDGDFEGFGQPYIESEDQRLDWTEVFSMLSLPLHLRKPHLFPELPLPFRETLESYLSKMKKLSTVVFEMLEKSLQLVEIKGMTDLFEDGLQTMRMNYYPPCPRPELVLGLTSHSDFSGLTILLQLNEVEGLQIRKEDKWISIKPLPDAFIVNVGDILEIMTNGIYRSVEHRAVVNSTKERLSIATFHDSKLESEIGPISSLVTPETPALFKRGRYEDILKENLSRKLDGKSFLDYMRM

SEQ ID NO: 31 - protein, 360 aa, Papaver somniferum
METPILIKLGNGLSIPSVQELAKLTLAEIPSRYTCTGESPLNNIGASVTDDETVPVIDLQNLLSPEPVVGKLELDKLHSACKEWGFFQLVNHGVDALLMDNIKSEIKGFFNLPMNEKTKYGQQDGDFEGFGQPYIESEDQRLDWTEVFSMLSLPLHLRKPHLFPELPLPFRETLESYLSKMKKLSTVVFEMLEKSLQLVEIKGMTDLFEDGLQTMRMNYYPPCPRPELVLGLTSHSDFSGLTILLQLNEVEGLQIRKEGKWISIKPLPDAFIVNVGDILEIMTNGIYRSVEHRAVVNSTKERLSIATFHDSKLESEIGPISSLVTPETPALFKRGRYEDILKENLSRKLDGKSFLDYMRM

SEQ ID NO: 32 - protein, 364 aa, Papaver somniferum
MEKAKLMKLGNGMEIPSVQELAKLTLAEIPSRYVCANENLLLPMGASVINDHETIPVIDIENLLSPEPIIGKLELDRLHFACKEWGFFQVVNHGVDASLVDSVKSEIQGFFNLSMDEKTKYEQEDGDVEGFGQGFIESEDQTLDWADIFMMFTLPLHLRKPHLFSKLPVPLRETIESYSSEMKKLSMVLFNKMEKALQVQAAEIKGMSEVFIDGTQAMRMNYYPPCPQPNLAIGLTSHSDFGGLTILLQINEVEGLQIKREGTWISVKPLPNAFVVNVGDILEIMTNGIYHSVDHRAVVNSTNERLSIATFHDPSLESVIGPISSLITPETPALFKSGSTYGDLVEECKTRKLDGKSFLDSMRI

SEQ ID NO: 33 - protein, 176 aa, Papaver somniferum
MDSVSAALVFHSSIYLCAMAHHGVSGLVGKIVTELEVNCNADEFYKILKRDEDVPRAVSDLFPPVKIAKGDGLVSGCIKEWDCVLDGKAMSGKEETTHNDETRTLRHRELEGDLMKDYKKFDSIIEVNPKPNGHGSIVTWSIEYEKMNEDSPAPFAYLASFHQNVVEVDSHLCLSE

SEQ ID NO: 34 - protein, 321 aa, Papaver somniferum
MESNGVPMITLSSGIRMPALGMGTAETMVKGTEREKLAFLKAIEVGYRHFDTAAAYQSEECLGEAIAEALQLGLIKSRDELFITSKLWCADAHADLVLPALQNSLRNLKLEYLDLYLIHHPVSLKPGKFVNEIPKDHILPMDYKTVWAAMEECQTLGFTRAIGVSNFSCKKLQELMAAAKIPPVVNQVEMSPTLHQKNLREYCKANNIMITAHSVLGAIGAPWGSNAVMDSKVLHQIAVARGKSVAQVSMRWVYQQGASLVVKSFNEGRMKENLKIFDWELTAEDMEKISEIPQSRTSSADFLLSPTGPFKTEEEFWDEKD

SEQ ID NO: 35 - DNA, 426614 bp, Papaver somniferum
  misc_feature (148427)..(148427): n is a, c, g, or t
  misc_feature (148809)..(148809): n is a, c, g, or t
  misc_feature (148851)..(148851): n is a, c, g, or t
  misc_feature (152159)..(152159): n is a, c, g, or t
  misc_feature (152249)..(152249): n is a, c, g, or t
  misc_feature (159070)..(159070): n is a, c, g, or t
  misc_feature (227211)..(227211): n is a, c, g, or t
aagcttgctttttaatttcataaccttcataaaataaagagtttaaaacagtaagtattaagttaatttgtgtacaaacgcatagatttcatgtttttatttgtaatacgtactacgtagtacctcttctttaagactctggttttcctttgacacaatttcaaaatcctgtttaagtacattgtataattcctcaattttctttcctttaagtctggcacgtcggttttgaaaccatattgctacttggcgaggatgcagccctagttctctagacagcttcattttcctatccggttccagctttaccttattcttcctttcatcgagtgtagcaccagattgttgttccagctctatctcctcttggaaactcttctccagtgcatctacttgttcactagacaaccgcgtcttcctccttgtctccacttggttgttgatgtttgcatcataacctcccacaccattttcagctccgcaatcatatgcacttctagaccatagcttcatcatctccgctcctacaaatcctattgaatttgcaatataatgaacagttataataagggtaaaaatagttaatacacagcacgttaaggggaaaaaaaaaggtaatgcgttggccgcaaaattatacatggaagagaaatgtttcaaacctggaaatgggtgaccaaatgattcatagaggtactgatgatcatgaacaaatgacacataattctgttgttctcctcctgatgttccactagttgcggagggaatttgaggagtagtgctactgcaatcactccaattagccatcaacgaaactgatatggattgtgtactgccttaataaacactagattattagattttactaaatataaccaaaagtttatctatccataaatatccactactatatatattcaggtgagtttttttacctaaaactagtgatttgctgtggtttggtaatgccctcaacatttatagaattaaaaatggtgtgtggattgagggagagggagagatagagagactagaaagatcccaagtgaaagagacataagagagagatatatgcctcaaaggaaatgagagtacgctcacagggttaaaagtaagtagattgagatacaacgaaaagagttgaaattaaaattgggatgaagacaagtgatacctagtacagtatgtagatatatgacataatgtataataattatatacagtcattttcagatgcagcaatgtacgacgctgcattatacagtcattttcatatgttatttatacgacgcttctatgcttatctcctcacatagttccaaaaccactataagaaaaagtaccgtcatagattggtgcctttcgtttatgtgatctgtattgcagaaatgaggatcttttcctactgtcttactacctaaaagagaagaactgttggtcaataaccatagagaacaaaaataaatgaaacacaaatattgccccccccccccccaaaaggaaaccatcaaattgaatgtgcagggcctttgtgaatggcgcatgtaaccaagtaaaaagggatagctaggtttgtcatcttgaggacaacatgtactttagatttggaaagataaagaggtgaaacttttaacatgtgatggggtaaccctggcgcatctatctgttccataagaatggctaatgacagtatgactgactcctaaatttgtttatcttcacagatctgccatgattttgcaagccagtagtgtattgataatataacaacaaacaagttttattaataacagtgaattaacttacataaagctgctccttattcagaccaaaataacttaataaaatgtaaaatactggagaattttttttttttttttgatcgatcaaaaaaaagcaaccccaaccaaagcaaccaaaatctagggttaaacaaaaagcaacaaaggcctcttgtcaaaccttagaaactaaacaaccattattacttgcgagctaaaacaagagcccaagttacatttaaataggattttcatcaacctcattcatggttatacccttgtgatttttggccataccactgaacatttcttgacggtttgccttggaagaaggaaagcttaaccccattattgaaccaaactccatcaaattacctgctgagatcttactaggactagtaagagattttgaagggcatttatttttgctgctaatgtctcattggcgaagagaccagtcacttttgactttctgcgcaacctagtgttggctccttgaaccggctcggacactgctggtttggtaatgctaatgtcggcgttttttgaagcaacctcatcttcttctcggttatatgttccgaatccagggggaattgacggatccgaagaagataaatttgccccttgttccatttgatgcaattcctgatactcatcctcgaaactaggagaaactcgtgacggtatactagaatctgcctttgccacttcacaagtttggtcttccaaagcatcaacatgtaattgaattccatgtatgatcatctccgtaaattgttcttttgaatctggaatagctgtcctgttagggcttaaaaccccttttgccatatcaactatgcaatacgcgctaatttatgaacattaataggtaaacaagtcgatgaacctctaaaacagccattagcaatttcatggttaactctttgagttggatgatatccatcccaattgcgataagcattcctgttcgtgcaaggtgtctgattcggaagacaaagcgaactcgcatttgaaatggaacaaaatggcgcatttcctccagaaaagcctacaattagcataagggtttctaactagggagttacaggtagacttctcaacatgaggagaaatttcaagtaatgaaaattttaccatatataagaggatttatgtcttgctggtaggtcttttcaaagatatcaccgcgaacaaaagtggagcctttcaaggtggatgtaagttcttgaatcatatttgtaattccaaagttgaaaatcttaaccaaactattaacacattctaaacatggggtagttggtcttggattaacactgttaacaattgacggtaagcacccaattggacccaattcaaacactacaaatttctttgcaccaatgttgtatatattctttagatgttatttgagtgttgataccaagagtgcaccgtattgttgaggtgcatatattttgctgctgttatcattgctacctataacaacaacaataacaacaactatggacttggacaagtatatggatatctttttttcgagttttcaaggatttaggtaagtcaatttggacagtttgtttgaagtaattcacttgttcttcaaagatcaagttgtctccctgcatttgaaagaggcaatagtaagtgtttacacattaaaaactttcttacggatgaatagtgcaatatatgtgcattttacgatgatttaaaattgaaaaagaataaatcaagtgaaattattgtggtcttactgttgaggttcctcattcaggaagaatgccagctgctccagatgcatattttatacgtgttgttatttttctcttttgcacttttgacaaacctaaatatgggggtacgaacggtaatccaagccatgcagctgccaaaagaaaccaatttattagaaacttgaaaatggaaagctaccactttggtaacagacactcctagagaattgaatagtctgcggtagtgtagccattggtgaaccttccactagccccataattgactttcgcagtgttttaagataattgttgttgccactgtcaacccaggaatccccaaacacatacaatgctggtgcaagcttatttctgtgcattactgatgcaagaacaagaccttggatggatgaagagaactgatgaatttgaatgagaactgaagtagtttcaaacttgtttgcttttgtttataagaggtttttgaatgaatgtaatcagtgtatggggtgtatcatttattggattaaatagaagttctaaggttttctactttttcaatgatcaaaagtatattacattatcatcaactagagtagagctggcaaacgggcgggtcgagctggattgttaccaacccgcgggttacgggttaatacggtccaaagcttgctggttgaaattcttcacgggtggtcatttttccaacccgcacccttcccgggtaaagcttgcgggttcataggttagtccggtttatttaattaaaaatcaaattataatttaattaagttaatttttgacgaattacaaggattaaacacaattattacaaggatcaaacacaaatcctttcgaatccttccctgtaacacctaattactccattttcatcccaacccatctttacttcaaccgcagcaagaacttaattaagttaatttttgacgaattacaaggatcaaacacaattattacaaggatcaaacacaaatcctttcgaatccttccctgtaacacctaacacacgtttaattactccattttcagctaacccatcattacttcaaccacagaaagaactctttacacagttgtgttctctgctcaaactcagactcatgcagatcaaccaatgacaatctccaacacttcaattccataacctgcaacaccttcaattccataaccgtgacaccaagaacactgcatcaccaacacccaataatcccaacagtaaattaatcaagtaatgatagtagatatgatttagaaaaatgaaaaaagaactttatgtttcttgaaacaaaattccttagtcttatcttcaatactcattctaaaacaaccaaaaacaaaattcaataaatcagttaaccgaaattttgaatcaaactgaatccattactcgcatcatagaaaacccttaatcaaaccaaaaaaaataaaaatcatctttctttaagtatgtgaattacaaccagaatcaatgaataatagtttcagaggataatcaaactagagatactgtaaccctaaaaaattgttcttctttcagatcatatactagggatactgtaaccctaaaaaattgttcttctctcagatctattataatatattcttcttcttacatacaagaggagataaagagatgagaaagaaaaaaaacaaaacagaagaaagatgcaggtggtgaatggtgaggaggcgcatcacaatagagaagagaacacagttgaggagaataaagaaaagaaagaggaagaagaaatgacccgtctgctagttttttttttatcattttatatcttaaacgtatgaatatgattaatcctagatgatttgacggtggaaattaaataatacttattacttatgggtttttgaccggttgacgggttaaaccgcgggtttgcaggccggtccgggataacccgttttcctacaagccgtcatttctccaaccctaacccgacttgtttagacaccagtcgagccggttgcgggttttttacgggccgggacgggtaaatccgcgggttttggcttgtttgccagctctaaactagaggttctataatttgacaagattaggttaagtacggattagtttaatggatgctttttacaagaaattaacaactattgaatggaaaagaaatcttcaagagaaacgtgcatccacgttggttggatatattcttttgacgaagacttgaagaagtgaacaagtaagcagctacaacgacaacatcatccttccacttgaagttagtgatatttgacttgaactgtttcattccctaacgtatctttcaagtcgtgcatattgaaaatgtgtgggtaaaatacccgacgaccacgtgtcaacatcccaagggatgaatacataataagatgaggaggttggagcaccgaatcattcgttgagagaaggatttgtctcagtcgaggcaactacacaagcgccacatgaatgacgcgtgtatgtaaaggtctaatctgctcagaaggtcaagtctaaaaagcaagaccgtatttaatgaaggataagaacaagacttgggtagttgggcatcgtgacgaaggacccggacaatctatactatgacccagaggcggtggaacacgaggctctccacagaagggcagcataatccaagggagagcgagacaactcggagggaggaccaagtatgccatcgtgagggacggtatataacgagtccgagggagccaggacgatggaagacagctcacccaactcgtacgatcaagtgaccaggagtttattttgtctataaataccagtccatgtaccaggagatggataacttatgtaatattaaatggtttttccacagagaattcctgagagcgatttagatagagagaaagtgacaaatctagaagagatctgtaacactttcaagggtaagaccttataatcaataagaaaacatctttttctccgtggacgtaggtcttcatggccgaaccacgttatatgcttgtgtcaatctttacatttcatgctatttacatcttgttcatgatgaatcttgtatgtttaagtaatttttagtctttaatgttacttgggtatagtagtcagaaaatatgcagctacagaaaacataactgcaaagcataaatgagtatactctagttagacgtattattaaggaatacaatatgaaatatagcacttggggcagtgctatcccgcacggtcgtgcgggaaagccatatgagctagcgggttgatagccatctgattgagcagatcttttattttctgttttttggtcaaagttacagctgttaatcgctgttaaaaagaaactaataataaatcctcacacctatttcacatttactaattactcctgacggctgctttgctctgtgtctccattaacagaattttaccattctttgattcaaatgataaagattgtaataaacgttgacaaaaaattaacaaaaaaaacatagaattaaaagttaaatttcgaccaacttaattaggttgattactcagttgggtgtttttacggtatcgatgagattcaggtacaacaaagataagcatgtggagattggttttatataccaaaaacaacaaacttgaatccagttaggaagataagatcacccaagaataccaggaaaacaacaagaagaatgaacaacacatggaccaaattttataaatgaccactaacaatcacgatatctggaaaaaaaatttaatcaattcagtagtttcttcgacagggttcaggttgatcgataaataagaatgggaaactctttcagtctttcttctccaccattaaagtaacagaaacttcatcttcttcttgacatttatataagattggatcttgttattgttttcactacctggactaaatggggaattttgtcgaaaatttctgaatagccatgattattcatgttcacccgagaaagtgagatttccctaactcactttaaagattctcataaattagttttaggagaaggctttttaataaaaatttagaacacaaggagagcgtttgaatttttcctaattaaaatagatggtttatttataattagtgtatggctagttgtacatttttcatcaacgtctaatataagttatatatcaaaatccaaagtctatcaacccgctagctcatataactttcccgcacggtcgtgcgggatagcattgccctaacacttatcttttgaacttcatatatgagacatcgatagtttgaatgctattgtggttatgtatgggtatgaggtgaagatttcatcctaagaaacaatgttttacattcgtttaaaggaagtaaattcatgaagttgtttcgtgaatcgatagggaaatcgctaggcttattggtattgttattcattgcatatcttttgaactaccaatatgtgtgattcgtataaccgctaatgacttttttatgttcttggtaaaactattcacaaggcctgacttttttattggtatgacttttattagtgaaaccgatctgaagtaatcacctgagatggtatgatcgatttgttgtaattggtatgaccaactctaggcaaaggggaactgatcctagtaagaggagcaaccgattacaagaggggaatcgacccttgtatgaggtgcagcaattttctagatattgggaaccgatcctatgaacttgtgcaacacgtttttagatattgggaaccgatattatggacatgtacaacaaatacaagttacataccatatatatgtggataccgatcatagtagctagccaaccgaattttggaaagctagtgtaactaattccagtacccacatggaggtagaaccgaaacttgttttggtagaaccgtgaaacccatgtttggtgattgattgttcttaatcaatcacatagttcttgaaactcagatgaaccaattctaaacttgtttggaagtgtggaaaatcggtttcaagattgtaagtattaaagaggacttacaaagtaaagatgtcgacattatttgaacatgtgaagtaacgcttatcttttattgttcaaagatattccttaatagctaaagaaaaaaaatcccggatagaaaaataaattgagaatcttttaattaaggtttttaattttatttttagaaaatgataattagtaatgtgcatttactagttggagattttctaagagattttcggtgtatgtttggacaaagcatttaaaggaattatggaaaccgaatttggaatatgttgcaaatattgagaatattttcggttttggaaattccttggtgtccaaacttccttggtctataaatatcaaagtttgcatttcgagcaaactaatcctcagagccatccagcaaacctacctagttgtgttattactcgtggagccgcctattcagagaggaaaataacctaattaggcaaaatctcttatgatcgctcggtttaaagacttctttgggactgagaagctctattagtatcgttggtgggaaactagataattgcggcttattatgagttttctgttgatttgaccaactaatggttgttggactttgattgcacctagtttgtttatgcttgagaatcttctcttctgatataagatgcactcaaattagatcgaagtttcgacggggatctttagactgtttgtagatctaaagacgtcttgtgataatccataacaaacttcgttatgtgcataattgatcacaagagattcaagttgattgtgtgcaggtatttattgaagatttaagaagatttgaagacgaagaagatttctgatttgggttcataatctttgttgtgcacaatacttgtttctgttaatgaggatccaactataatcggtttatacttgtggtagattggattgattagttgagaagatcagcatcaatacaattctttgtgattcaaagtattgattgcaaaatcttgacaattactttggtagttgttattagatagatctaaggacctgacaaaggagtttattgggataaacgaaagagccttttgtcgaactcatatcacttggttgaaaagagttgttaccaaacagatttgttgttcctttactgtttggaatacaaaccaaaggaagtgttccaagtacgtgaattattacaagttgaaggcgtgggaatacgacagaactaggtgaactataactttagttgcttggtttcaaacatatgaagttggtttgattttgtatagcggattaatcctaagagtattcaattctggacaaggtcccagagtttttctgcatttgtggtttcctcgttaacaaaatcttgctgtgtcttttacttttctatttccgcaattatacttgtttttattataattagaaataaaatacacatatgttaattcctatttacttgatagtaatcctattgtgtttggtttagtccgaaccatttatcaagtaaacatacttcgttgttatattgtctcgatttcgtatccatagacgatcacacgaagtgtgaactgattaattgtagtgtctcgactcggtttatagacaatcactttcggagagagtacttataggtggaaaggttttagactgaggtatatttggttaacctcgtctttttacaatgtctccttcttcctcgttcgttagcttcatcttctcgctcttccctttctttgtgaacttctctgcgatgtcgcactcttcctcgcccttcggctgtttcatcattccctccttcattcttctctcggtgatgttttatactttatatagatgtggctctggtagtctgggttttcgatctcgctggagtatgtatgattctttcattattgagacgatggttctcttccagtaattctgcgtgatgtcgcacgagatttccctttctcgttccatctctctctccatcctgttttcttgagatagtattttccttagttctttgatagtcatgtcctcttcgtcgtctgtttctcctctttcactaagaaccggttgctcttcttcgtccatggtttcggtgtcggtcatgtagactgatccttctgtggacatgtcactgtttgggttagcatttggctgtcgaactgccccacatctttctccgactgatgaagtttccgcaacgttcattcgtattcctatcatttctgtaactatccttcttcttcgtgtagctatcaagtgatcttcccttgttattctggactgaagtttgtactgctaataatctatatccaaaccctaaatcgtacgattcaaagtatagatctgtgactcggtacaaagatattctctggtcttactcaactgataacagtttcgatatatccaagaattagaaaataaatgtctaatgattgagactctcaaataaacaaagtcctgctgaaatccgtgacacaaaataacaaactctttactctcagatatagacaatgacacttctcctttacttgaaaatttgataaggcttgacaaaaccttaaaggtttcctagatctacaaatccaaaatgaaatacgtctgaaagtttaaagatctgatggagtttgaaaccaaaaatccatagaactaactttttgcgtatgaaagataaaatcaaaacgacgaacaaaaaagatagaatatacaaaaaaatggatctatcatgatgaagaagaaaaattaacaaaactagaaaaactcaaaccatgattcttaaagaaaaataactcacaggttcttgtccctttgtctggtgccaaaatgtagctgcaagaaatcctacaactacacccaaatgataaatctcgaacaaattactaaaactagtgaagaagataagattcaactcagttttattagtttttccaattaagtttcatacacaaagattatgatatctctccaaggatataaaccctaattctctctttacaacttttctcaccaaacttagactcctaaaaccttattaccctctacaatgccctcttcttcctaatatagggctttacatagtggatattaactaagaaagtagtttcttctcctacaaactcggatactctccgatgtctctttatcgcataatttgggtcaacgatagtggtgcagtcatgcttctcatgtgttcttccatgattgtcgatgtggtgttcatatcgaatgtgatgagtcatcgaagtctaatattatcgtgttccttcttcatcgtgttgctttctatttaccttatacttgactttcctaaatatggcgagataattcgtatccacaattcaagttcatacatgctataatttctttccatcggagttccacgagaagatcttgggtagtttaattggtaatccgtactttaccgttttggaactgggattcttctgctggtatgaaaatattgttagtttattgaagactaattatttcctaagttagccgtgactgttttggtaaaagggtttcctaaaacggctagaattcttggtgtccaagtttgtaacctatataaataggtaattaggccttgtagaattgtattgtgtagaaaactattaagagaccagtgagagatttcttgtatagcttttatgtctaaagcttaggtttcgttgtgaaagcatattggtgaggaacaagagacaaggttatcgtctcggataattgttgcggtgtaaccaaaggtttgctgggattcacacgacattgtaatcgtttcttcatagtggattgagttggtgcggctcaaagtggaagtagacaatatatataagttgtatgtattggtcgaaccactataaatcttgtgtcttgtgagttgatttatctttctcgtattattattgttgatgtgcttggtttactttttattcatcgtaatatctcaagatctgttattgcgcggttgttagtgatttcataagaaaatcctgccaactggtatcagagctcgggttagagctttagggtttatcgtagtacgattggagtgggagttatgggtgataataacgaaagtacggtagctagggttaaagtttttaatgggaagaactttgcgttttggaagtctcagatggaagactacctatatgagaaagaccctgctgatccattgggtggagttacgaaaaagggagcacgcaaagacgataaatggaatactcttgatcgcaagtgtgtagccgagatccgtagatgtctaatggaggaagtctacaataacgtacaagaggaaactagtacgaaggatcttatggataaacatgaaaagttgtatcaaaagtcatcagcctcggggaagactatgttttgtgagcaattatttaatctgaagatgcaagaaggtgaagcgatttcaaaacatcttgggaagtttaaattaattatttctcagctttcaaaagttagtattacttttgatgatgaagttcatgctttacggttgttgtcgtcattaccaaagagttgggagactgcaaggacaaccattagcaattccgcaaggagcgagaagttgaagcttgatgatgtgcaacaaaggtgaattgctgaacatgagagaagaatgaaaaagcgggggtctaacaacaccacccaatatttctcttagcaatatgtatgtactaactcgaatatacttttaagagaatcaaaaagactcaatcaattaaaagtatatcaacaagtttatatctctctcttgttttttatttactcaagctaatagaaatcaacgagtcctaatcaaacacaaggaataacttggacggtaccaaagaccaatgtccaaggatcaatcaatatcaatcaacaaccacaagtcatatttctaatttattgattcaaccgcacaacctgtattatttcaattatataaacaaatataatgcggaaatagaaataacacagataccagatttgttttaacgaggaaaccgcaaatgcagaaaaaccccgggacctaatccagattcaatacacactgtattaagccgctacagacactagcctactccaagctaacttcaaactggaatatagttgaaccccaatcagtctcacattgatccaaggtacagttggactccctacgcctttgatcccagcaggatactgcgcacttgattcccttagctgatctcacccataactaagagttgttacgaccaaaatttgcaggctttaaaaataaacaaatctgtctcacacagacaagtctatcaaaggatcaatctttctcccacagaaaaaccctaaaagttttagttccatcttttgatgataatcaaggtgaacaggaacgaattgataatccggtgttatattcccgaagaacagcctagattaatcaatcacctcataaaaatcttaatcgtatggtagcgaaacaagatgtcgtggaatcacaaacaatgatacaaaggtgtttgtgattactttttatatatttcctatctgagaactgtcacgatctcatccaatgaatatgattgtattgttacgatagaagatgcaatatcaaatcacacaactacgatagaagtagtatatgtaagtctttaagtcgttaacctagttttagaaaaagaaaaccaaaggttaaatgagaaacgactctagcaggcagactagtatcacacgtaaggtgtggggactagttttgcacaatactagatgtctcctttatatagcctttcaaatcagggttttgccttagttacaaagcaatcaatattcactgttagttgaaaacctgatttagattcaagctaatatttctcaaccgttagatcgaaaacttagcttgtcatacacaaatgactgtacgcttctaggtttgttaaccgcacccaaacgtgtacattgatggttcaacaatagtctacccaaagaggttaaccatatgagcatttcataccaaccatgttcttcttcaccataactagttcaattgactcaaatggactagttaagagagttgttcaattgcaaggaaatcttatgtaactaaacaagatataattgaaacaaagatgatttgattcactcgaattagttcatgaactttaatagccacggtttgcaaatgcattcattatacttttatgattaagatcagaaatcgtctttatatatatataaccttctcaagttcgcagactaggttcgcggacttaagacaccggatagagtttacaaactccagcagaaattctcggggtcgagaaccacgccagttcgcggactgggttcgcggacttggctcacgcaagtagtttgtcaactccagcagaaattcttgggtttgagaacttcggcagttcgcggattaagttcgcggacttggcacttgccatacttccggttttcttgataaacaaagttcgaaaacttcagttcaaggaatccattggttatgtaatctaaaatctcattacaatcattggaacattcttagaggacgttatataattgtcacactatttctcgtcaaagcaattttcaaagtgattgaaacattcatgactttcgtcactaggtaaagataaacttggtcgaagcaaaaatcttatcaacacatatttcgagatatagataggcaaggtatactcggctcgaaataccaaatgtgtatcatctagtctatatatataacatacgacttttgtctcaaagattaggagatacaataggtaaacttttgagtgacagataagttcaagtccccacatacctttttttcgagaagttccactggttccttgactagatcttctacttgtatgatgaatctccatgaagtcgttgagctcaactacacttactatcctagtccgagacttagctataagagactagaaatcaagacttatagttttgatcactaacattgacaaacatgcttgagatagcaacgcatgcgagtttgaccgatcagtgctctaacaatctccctctttttcaattttagtgacaaaactatcaatacatatggaatacaaaaaatataataaaactttagtagctcctattccacatgtctaatcttcaacattcctcgaaatcttcgtcacttccaagtactccaatgatccaaaaggttgtaagtttagcaccatcgttgttgaagatccgtagccataacaatgagaagcatcggtctcgatcattgttatatagtgtcatagtattattacatagtgtcaaagtccgattgtatcacaacttcaacaataatactatggtgatatgtatcactcccccttagtcaatactccatctcacatgaaaaccactcctccttacgcaatgatccgaaaaccatatgtatttgtagtgtgaattacatattaattctccccctttttgtcaataaaattagcaaaggtacaagaacgggatcataatgaaatttcagtaaaatacatttcatgactgagagaaaaacacacacatcatcttatttatatgcaatcatatagccgaagctaacaacattcatcaaggagtttaaagatacaagataacccctctaaaattccacagccgcacacccctcaagatatgaccattaagtacaagttcaaaagaactctcccccatttgatgtcattcccaaaagaacaacaacgagcgaccttaatttcaagataaaagaaggatttttattggacaccaaaaccatgagaatgatttttatatccaaaactcaatcaaattattcacaagtaaacccatgaataatttaatccgaatacataatcaaattaaccacaagactgatcaatttaattcattgtgcttaacataagtaaacttacggagcaacgactaagttaaccatacaagagagtaattggcttaatcgttcatgtactcaacacaagagaacttgtggagtaataactaaataaccaagaagatgattaatttagttctaaatgctcaacataacgtatcttacggaaaaaccaaccaagctaatcaaaaataatcaacttagttgtatcgtactcaacataagacaaatcacggagcttcacggtaatacaaaagtctattcattcttaaaccaatatgtgaataccgatcgtgaacgactttacttttgaaaaaaatatggacaacaaagttcacgaacgtaaacaaaaatatcccataacaagttgcaatataacaaatcaaaaatattgcaaaacatcatcctccaaatagttttataatttaaaccaaaaacctaaaaacaggaagatgaaaacaatagctatgtatagtcacaatcatcactattcaaagcattagttattcttccaactaaaccaaaaagaagacatactaggcaacaacactaacactggaagcttgatttaaaacaccttaaaccctgtcagcaacgagagattgaacatagacgagttcatcagttgccttctttagttcgtttttcagaaaactaagattccttgttgcaatcccgagatgctcacgaacaacttcaaaatcatgaagaagatttcctaccagttgtgaagacaattgaactggtagttttttttcatgatcaacaacatggaagcatgtgatggagacatcaatcaattcactggtcttgtcctgcttgacttcaacaaccttgttgttttcatccattgtgtaaaaaaagaattcaactgaatcttttaaccttatggatcacaatatttataaagatttcagaaacccaaggaaccatagtgttcgtgtgggtcctgtacgtgtacaagcggtcaaccgtcagtgagagggatgaacgcagagaagaagagaaaagaaaataaataactcttaaaagaaacacaacctcaaagcactcatgccaacattctcaagataagcaagttgagaaaaaaaagcatccttcttttttaaaagatagatgctaccctatgtagtcatattgcactaagatgagcatttggaccatcattattgacttcatctatctctccttcaaggggatttagagaagaaccatacatcatagttgaagaaggtttaacaagagaggaattctaaatacctgagccagtggatatccaagtctttttgatgctccgtttgagtttatttatgctgatcttaagttctttgacccgattattaatatgcatgaagtctggatcaagtatcttggaaccacaatcttcttcagggtgagacaaggaatttacccttcttttcctatgcctttttctcttttcatatttatttagaaaatcagtagctctgctgttgttcttcctcctacctttgttgaccttttttgatccagcagcacaatcaagaaggaacttactacggtgtcctgtttgattttagaacctgttaattggcccaacaaaatgagggacaggtttaataacttctttagacacccatgtaataatgttgtgaagtttttcattcctaatccgaaaaaaacatttctgctcaggatatcctttatttccacagtaatagcagttaaagggtttgtctgtctttatgcgagtcgatttagagggagatatttttttgcctttagatctattgcatgctgcgagcggtttttcacatgaggaattttcgctagctttaccaaaattaatcttattagtccttggagcgtctattcctttatatcccagaccacgtgtatcacgatgttctttatatgctccaatcatagaagataattttgtagagctcgaattgaaccttctcagattttattccagtgattttacattatcaagagcagcaacaagatcagtttccaaggatttttatttggcaaggagactgagttctttgtcattaaaacatgtttgttgagagtcatatcttgcatcagcatctacaagtttttctttcaacaaatcgagatttcagagaagattatcacattcagacctttttgtgcgtaaatcttcatcacgatctttaacaatagattttaggagtctatacccaccatcatatcctttaaagatttttctcaactttttgttttcttgacaaagagtagccatgtattttctcaagcaagatgttgacttattctctttcaaagcttgatcaaacaacttgatatattgagcaacttcctcatcaacactttgaccttcttctgaatcactatcatctgaaagatcatccaattattcatgaagatatttttcccaatcgaatgcagattcagacaaaggacaggagacaaaggttttcttagaggtttcaggcctttgaaacccatcagagtaattctgaactgatgttgcgtcattagagataaacctgtccatcctcagatcgctacaaacacagacttttgaggtcttaaacatggttgccagctctgataccaattgaaaaagcgggggtctaacaacaccacccaatatttcgcttagcaatctgtatggactaactcgaatatacttttaagataatcaacaagactcaattagttaaaagtatatcaacgagtttatatctttctcttgtttttgatttattcaagctaatagaaatcaacgagtcctaatcaaacacaaggaataacttggacggtaccaaagaccaatgtccaaggatcaataaatatcaatcaacaaccaaaggacggatttccaattgattgattcaaatgtacaacctgtattatttcaattatataaacaaatataatgcagaaatagaaataacacagacaccggaattttgttaacgaggaaaccgcaaatgcagaaaaaccccgggacctagtccagattgaatacacattgtattaagccgctacagacactagcctactccaagctaacttcggactggagtatagttgaaccccaatcagtctcccactgatccaaggtacagttgtactccctacgcctctgatcccagcaggatactgcgcacttgattcccttaggtgatctcacccacaactaagagttgctacgacccaaaatcgcaggctttaacaataaacaaatatgtctcacactgacgcgtctttcaaaggatgaatctgtctcccacagaaaaaccctaaaagtttttgttctttcttttgataataatcaaggtgaacaggaaccaattgataatctggtcttatattcccgaagaacaacctagattaatcaatcacctcacaaaaatcttaattgtatggtaacgaaacaagatgtcgtggaatcacaaacaatgatacaaaggtgtttgtgattactttttatatctttcctatcggagaactctcacgatctcaagcaaatcaatatgattgtactgttaagatagaagatgcaagatcaaatcacacaactacgataaaagtagtatcggtatggcttcacaatcccaatgaagtctttaagtcattaacctagttttagaagaagaaaaccaaagattaaaggagaaacgactctagcacgcaaactagtatcacacgttaggtgtggggattagttttgcacaatattagatgtctcctttatatagcctttcaaatcagggtgtttccttagttacaaagcaatcaatattcaccgttagatgaaaacatgatttagattcaagctaatatttctcaaccgttatatcgaaaacttagcttatcatacacaaatgactgtaagcttctaggtttgttaaccgcacccgaacgtgtacattgttggttcaagaataatctacccaaagaggttaaccatatgagtgtttcataccaaccatgttcttattcaccataactagttcaattgactcaaatggactagttaagagagttgttcaattgcaaggaaatcttatgtaactacacaagacaattgaagcaaagatgatttgattcactcgaattggttcatgaactttaatagaacggtttgcaaatgcattagtcttttaagattaagttcagaaatcatctttagatatataaccttctcaagttcgcagactaggttcgcggacttaggacaccggacagttttacaaactccagcagaaattctcgggttcgtgaactatgccggttcgcggactgggttcgcagacttggctcacgcaagtagtttgtcaactctagcataaattctcgggtttgagaacttcggaagttcgcggacttggtactttccatacttccgattctcttgatcaacaaagttcgaaaacttcgtttcaaggaatccattagttatgtaatctaaactctcattccaatcattgaaacatacttagaggacgttatatagttgttacactatttctcgtcaaagcaattttcaaagtgatggaaacatgactctcatcactaggtaaaaataaacttggtcgaagcgaaaagcttaccaacacatatttcgagatatagataggcgaggtatactccgctcgaaataccaaatgtgtatgatctagtctatatacatagcatacgacttttatctcaaagagtaggagataaaatagatagacttttgagtgacagataagttcaagtctccacatacctttttctcgagaaattccaccggttccttgagtagatcttctacttgtatgatgaatctccatgaagtccttgagctcaactacacttactatcctagcccgagacttagctataagagattagaaatcaagacttatagtttttatcactaacattgaaaaacatgcttgagatagcaacgcatgcgagtttggccgagcagtgctccaacaaagaatataacaaggttacggttcttgtacttcaagctcggccttaagtttgcaggaagaagatagatgcatgggttcaaataggaacaacaacaacaaatccagatggaagtctagaggaaaatatagggggagatctcaatcccgacctagaggtgttgttgagtgttcggcgtgtaagaaagtaggacacttcaagcgcgattgtccggaaaaaaaggtgctaataatggtggaaacaatggtaatcaagaagaggtcaacatagttgcagccgcggagccggtgaaggtccttgttgataacatgaaggtgattacagaaggtttctactactctatgaggacaagcaagatgagtcttggattatagactcgagagcttctttccatgcaacgagtgataagactattatgatcccttataaagaaggatactatggacaagtattcttaggtgacggtgacgcatgcagcatcattggtttgggtgatgtgatcttgaaagtcaacagttcgacatggaaattcatggatgtgcgacacaatccaaatttgaagaaaaacttggtatctgtgggacacgtttgtgatgatgactgtgaagttgtgcttacgaaacacaattggaaagtgaagaaaggagttatggtatcatctcgtggagttagagtcggtactctataccggacttcagatggaactactttagcagtggctagtagtggtgaagacactaacttatggcatagaagattagggaagatgagtgagaagaacatgaagattctatgttcgggaggatatctacctaaggtgaagtctgttgatatgagtttttgtgaagactgtgttcttggaaagcaataacgggttagtttcagcagagcaagaagagacttgagaagtgcaaaacttggtttggttcacacggatgtatggggaccaattgatgttgcatctcacagcgggttccattattatgtcacctttattgatgatcactcaatgaaagtgtggctttacttcatgaagaataagtttgaagtgtatgaagtgtttcaaaattggaaatattcagttgtaacagaaactggtctgaagttgaagtgcttaaggtcagacaacggtggtgagtatgacaagacagaattcttacagttatgtggtacgaatggaattcctttggagagggcagttccaaggacgccataggagaatggagtggcagaacgtatgagttggacgttgaatgcacatgctaggtgcatggggttgcagtctggtttgctcgagaccttctgggcacatgcaacggagacgtcttcttatataattaataggacacctagtagtccattagatatgaagacaccataggaggtttggaccggcaaaaaggtaaatctttcatatttgaaagtttttggttgtgttggttatgttcatcttagtcccggtgagaggtctaagataggttctcaagcaaagaagtgtatatttcttggttacggaaatgacgcttttgggtataaactttgggactacgagggtcacaaagttattagaagtagagacgtcacttttaatgataatgagttgtacaaggataggaataaaacacaagttgaatatgtcagatcaagcaacgtcgataataagttgtatatcgatattgattatgtttctagaaaaagtctggtacaagaagggaacgatattgctgatggaagagaagtacaaggtgaagatacttctactgtagtgggagttactcctatagttccacaagaagtacgaagatcatcaaaaacttcaaaaccaaacccaaggtatgctctgaattatatattacttatggatagaggtgaacttgaagatattaaagaagcactagcggttgatgattcaggcaagtggcaacttgctatggaagatgatatgaattcacttgaggagaatgacacttgggtgttagtaaaattaccaagaggtaagactgcgttgcataataagtgaatttttcagatgaagtctgaagccaatggagatattcgctacaaggagtggttggttgtgaaaggtttccagcaaaaacctggtgttgattacaacgagatgttttctccagttgtgaagatgactattattagagtagtgttaaatctagtggcttctgaagatctctaccttgaacagttggatgtaaagtcagcttttcttcatggtgacctagatgaacaaatttacatgaagcagccagaaggattcatagtaaaaggcaaggaagagatggtgtgcaaactaaagaagagtttgtatggtttaaaacaagccccgagacagtggtacaagaagtttgataacttcatgcatagaggtggttactcacggtgtaatgcagatcattgttgttactttaaaaagtgcggttctgactacatcatattattactatatgtggatgatatgttggttgccggaacatctctacaagaagttgagaatttgaagaaacaattagcaagtgagttttctatgaaagatcttggtgaagcaaagcagattcttggtatgaggatcataagagacagagctaagggtgtacttatgcttagtaagactgaatatattgaacgagtgttgaaaaggttcaatatggagaatgctaaaccagttagttatccacttggaagtcaatttcgtctttcaagtatgcattgtgctaagacaaatgaagaaaaggagtacatggctaacgtaccatattcttcggctattgagagtctaatgtatgctatggtgtgcacgagaccggatattgcacatgcagtgggagtagtgaggtgatatgcaagcaacccaggaaaacaaaattgggaagctgtgaagtggattcccaggtatttgagaggtaacacaaacgtaccattgtgttttggaaaaggtggttctatcttgaggggttatgtggattcgtacttcgcaggtgatgtagataaaaggcgaagtacgaccggttatgtttatactatggggtcagctgcagtgagttggaactcacgtttacataagttggtgacattgtctactatggaagcggagtacgtagcagtaacagaagggagcaaggaggtgatttggttacgaggtttgttagatgagttgggaaaggaacgacgagatagtgttctgtatagtgacagtcaaagtgctattcatctagccaagaactcagcttatcatgttaggatgaagcatatagatattcgttatcattttattcgagatttcttagaagaaggagagtcgaagctcgagaagattcttggttcgaagaatccggcggatatgtttaccaagggagttacatcagacaagctaaagctctgcaaggctttagttggtctctcaaaatgaggatctaggaggggagccgcactgataaagaagatgttttagcaccgtcaaatccaaagttgaagaaaagaagaattgaagacaatccatgagtcttcaaagtgggagattgttagtttattgaagactaattatttcctaagttagtcgtgactgttttgggaaaggggtttcttaaaacggctagaattcttggtgtccaagtttgtaacttatataaataaataattaggccttgtagaattgtattgtgtagaaaaagattaagagatcagtgagagatttcttgtatagcttttagggctaaagctagggttttgttatgaaagcatattggtgaggaacaggagacaaggttatcgtctcggataattgttgcggtgtaaccaagggtttgttgggattcacacgacattgtaatcttttttcttcatagtggattgagttggtgcggctcaaagtggacgtagacaatatatataagttgtatgtattggtcgaaccactataaatcttgcatcttgtgagttgatttatctttctcgtattattatacttgttgtgcttagtttacttattattcatcataatatctcaggatccgttattccgcggttgtcagtgatttcatacaaaaatcgtgacaaatatcttatgtcaatgtatgctacaatgcgggttcttctacgacggactttgtgactctatgcatcaaccaccagctttaattgatattcagatttattgtagaccacaaaacgaggttggtaggctgtagcatcgtcatgtcccaaaggtcataagatttgcaaaggcagtagtgagattttcaatataattaacaaccaccaattaaatgatacctagctagaagttagctataaaatgaatagtagagttatatctttgcttttaatttcaagagaaattttgtggaaactgagcgaagtagtaatggagaagaaaacaatagcaaaaaagaagaaaatgatactggtaatttaagagagaatgacaaagaaattcttatttctcataactaaaacatctcaacacatttgtagtaatcaggagtattttatttcgtttatcaggaaacgacaatacttttttgtttctttttcctttcaaaaaggcaagattaaattaaataagaaagagtatcaagaactccaaaaatataccagagtttacaacagattattttcttagcaaattcatcaaagctggtgcatttcattttatctatataaaagcttcatagatcataaccttgttcaatatatttagacaacagcaaaaccatggtttctttttcttccctacgttgtatttctacttcctcctcaaaaacactgtctgcatctctaaagaagacacagatttcttaagatatattggggaatggtagacgtcctttttcttagggcatatcatctgggaatggttagctccctcccgaatctcattaagaagtttttcaattcttcatcccctgatctgggaatattaggaagacatgcgtcgagaagggaatatagtagtagttccaatgggtgtactaacgactgcagcagcatcaaaaagttgggtttcattagattctaccggtaaagctacagtcttagatgttgatattttgcatagacttcagattcatgcaagagatttccggattcttgatcctttattatcttatccttgtgccattttagggagagaaaaagccattcttgttaatctagagcatttcaaagctataataactgcagaagaggtattacttcggtatccaatggatgataatgtaattcccattgttgaagaacttaaaacgcggcttcttccaggagacaaagaagatgaatctccctttgagttcctggctttagaagtggcactcgaagctgtttgtaattttctcgatgcccgggcaacagatttggaggctgcttcttatccagcattagatgagctgacatccaagattagtagtcgtagcttggatggtgtttgtaaactgaagattgaaataacgagattggctgcatgcgtgcaaaaggttagagatgtgcttaaacaacttttaaacgatggcgacaatatggccgaaatgtacttatcacggaaactaccttcatcatcttccatcagtggaagtgcaggaacatttccgggagataatccgaacgatgttaaagagcttaaaatgctgcttgaggcatacttcgtagaagctgaccgtaccttgaacagattgaccaccttaggtaaatatattgatgtcaccgaggagtacaagctcaaaaatcacagaaatcagtcgagtcagttggagcacctcctaaattctggtactctttgccagtcaatgtattccgccgtggttgggatatttgacataaatataccatttacatggaatcatgccccatatgactttgtgtttaaatgggtggttattgtcccgggagtggtatgtgcagctgtttttggactgattgtagagtatgcccgccgcaagggtcttgttgggtaatagttaagaaaacctttctttcagtactaccaccatattatgatcaggaattagggcttttatttttggtaagatgcctgactttgattttggatttcaattcattatttaggtttccatggttttttttgacattttcttgtgaggtattatctcaactgtatgtgtgcgtttgttatggattatttagattgatagttattctacattgaagtgtatagatgcgagcgcccggttgttgttctagctctatgtcttcttggaaacttctctccattgcatctacttgttcactaggcaaccacattttcctcctcgtctccgcttggttgttgatatatgcactactagaccatagcttcgtcatctccgctcctacatatcctattccgattgcaaaaacagactagcttgttaacagatagtttcacacgcaagcacgatggaaaaaatagagttcttggccgcgaaaaatacacatggaaaacaaacggtttaaacttggaaatgtgtcgccgaaggattcatagtggcagtaatactcaaaaagaaacggaacataattttgtcggtgttgttgctctcttcttgatgttgtactagttggggaaggaatgtgagaagtactactactgcaattactcctattagccattaccagcaattacttcaattagccattaccaaaaccgatatcatagaaatatctattcgattggattgtgtaattgccttaataaacactagattagatactaaatataaccaaaagtctatcagtccactactatatatattccttcggtgatggtaataagtgacctagctcaaatttacatgactcttaaggcaagaaggagaaaaaaatattcatataattatatccttataaataataattagtaaaattaaaaatggttatctctcaaattaatccactaatatgtctcaacttatggatcttaaagacacggtttataaaggggataccgctattacttggtggtgataccaatccatacaggacaaataaatattaacagatcctgaccgtcgaatcactaaattggtatcacccctcctaatagtggtatcccctttacaaatcatgtttgtcatcgaccacctagttatccttattttgttgacgtattatgtatattattcattttcatttgtaaaatcacagcatctccgatttatataagaagttttgtttcttatataccaaattctatgtcgcatattcatctctaaaacggagttacttttccaatttgtacaatgtgtaaggcaagcatgtgagagagcaactttttaagtttatttccaaaaccaccctcattaaaacatttagttacaataattatcattagtttgggaaaggatagttttggatattcatcgtattataagtgagagtacttcttttgcagatacaaaatttttcccgaaacctgcacagtcgaccgaatttaaattttaccttgccgattaatgtgcgtacttttatggacccaattttcgccactcggattgcaagacacaatcctcactttaaaaatgacataaattcaatatgtaacccttggcttggctgcaaatcctaaatgtagcagaaattgagtggccatagtgcttgttctaaactggtcgtcaagaaagggaggagctatagtatctattaggtctaagtgctaaatgaatgttggtagttcaaatggaagagccatgatttcttcagagctaggagacctttcttggcttcgtcctaggttgttccttaaggtcaaagtcatttttttttttagatcttatgatcggtaaagaagatttattgatcaaaagtcatttcccttaaggtcaaagtcatttcgtcctactagtttcatttacaaccaatttcaacttatttatttatttttactcgcactgctcgtttgatgtcatcacaacacaatggtatagggatgtttcaaatcaagctgatcatggacaagtcgcattcctttccacacaaccacatggaccccgatctttgttatgcttctccaagattcccaaccccagtatacccatatataattaactatcttagagttaataataaaaaccatgatctagcagataactatgtaaatcgaactagccatcagaagtttccttgatagaacacatgcttattggtctaggaggtatgtaaatggtgcaataacagattaacagataggttttgtacgtgcagatagctgcgtatttagttgatgaggcttatatgcaaagctctacccgaatccgatgaccgtccacgtagtcataaaaaccaagctaattaattccactgtgcatatagtgatgctgctttcgatcaaattttagttggtttctagctagttttgaaattctagttcacatatgctggttttccttttttttatccgacttccatgttaaaatattgggtagtttaatcggtgatcgaacttttgctttaccttctatgtatgcaaatccaggttcttctcttaacgacagatttcgtgacgctctgcatcaaccaccagctttaactgatctttaagatttattgtacaacacacaacacacaaagaggggtggtaggctgtagcatcaagccccaaaggtcataataagatttgccaaggaagtagtaaaattttcaacataatttaacaaccaccaactaaatgatacctagttaaatagtagaattatacctttgctttctagagaactttcgtggaaactgagcaactagtaatggagaagaaaacaattgtaaaaggaagaaaatgacgattctgataatttaagagagaatgacaaaaattcttatttctgataattaaaacatcccagtacatttggggttatcaggagtggattttatttcgtttatcaagaaatgacaatacttattttgtttcttgttttgacggaatcaatatccatttaattgttagtttggactttggagattaaatgacgaattttattggagaaggtaatgcttgtgcagatagtctagctaaatttggagctactgctaccgaagcttggtggtggaattttccaccaccgatgatatatgttcgtagtgaaggttgacaaagacgaattctttaagctggtgtaaaattctttttatctatataaagattcatagatcataaactttttcaacattcaaacaacagcaaacccatggcttctctttcttcccttcactccatttctactgcctcctcaaagactctatctgcatctcaaacgaagacacagatttcttaaggtatatttgggaatggtagacgtccttttcgttaaggtatattcgggaatggttagctcccttcctactctcttgattaattattcattaagaagttttccaattcttcatcccatctgggcatatttggaagaaatgcgtcgagaagggcttatagtagttccaatagatgcactaatcactgcaacagcatcaagaggttggatttgtatagattgtaccggtgaagctactgttttagatgttgataaatccgaaaatcagttgcatcaaaaatttcagattcatgcaagagatttgcggattcttgatcctttattatcttatccttgtgccattctagggagagaaaaagctattcttgttaatttagagcatattaaagcagtaatcactgccgaagaggtatttctgcgggatctaacgaatgatgatgatgataatgttattcccgtggttgatgaacttaaatcgcatttgcctcctgcggaaaaacaaggtgagtcaactacctttgagttccgggccttagaagtggctctgaaagctatttgtaaatttcttgatgcccgtacaacagaactggagtctgcttcctatccagcactagatgaactgaaatccaagattagtagtcgcaccttggatggtgtttgtaaactgaagattgaaatgacgagattgacaggatccgtgcaaaaggttagagatgtgcttaaacaacttttggacgatggcgacaaaatggctgaactgtacttatcgaggaaaatggcttcatcaccatcaatcagtgaaagagcagcagaaacattttgtggagatgcgaacgatgttaaagagcttaaaatgttgcttgaggcatacttcatggaagctgaacgcaccttgaacagattgaccacattacgtgaagatattgatgtcaccgtggagtacaagtttaaaaatcatagaaatcagtcgattcagttggagcacatcctaaattctggtactttttgccaaacgatacttacccaggtgactgggatatttggcatgaatatcccatttacatggaatcatgccccgtacggtttcatgtttaaatgggtggtcattgtcccggtagtgttatctgtatctgttttcggactgatcattgactatgctcgccgcaagggtcttgttgggttatagttgaaaaacctttcttctactacgatccgataaaacctttcttatagttctactactaccaccatctgataatcatgaactaggttttttttataagatgtttgattttgtttttgggttgcaattcacattatttaaaagtttcatgacatttccttctgtgttagactcttgtttgctacttttttttttagtgcctgtaatttattctgttttgtttttgttatattggttcatattcaaacatggatcttaaatatttttaaacacgtaaattgttttagacttgacatcaatgggttcatctacgactaatcagaatccatcttcaaaaacgtctaatcagaatccaactccaaaaggtcgggtgagtcgatcagggtcagaaaattaggtaaccattccgaatgcttagctgcagcagcgttcaatgttaccaaacaaaactgccagtgtggaccatcatcatgggcctccggccttagtatcccaggtgctgacttatctcgagaccaacaaatcataaataggtatcagaaaacctaaataggttttgcaatcaaaagaaaaaaaattcacctgtgaaaatcaaacgactagagttaaagcggcagcagtcaagtttcatctgattctccctgatctctcatcccgattcattgatgaaagaacttttgaattcttcatctcctctgctacacttctcttttcaactgattctagggtttgggttgttctcattgatggtatgttttgatcctccttagaaccttgtattttttgttttcactttgatatcgtttttttttctgattaataaaataaaaataagaaccttaatcttctctttttgggaaaatacaaaagaactataattgggacgagcatatagtaatagttcctacggatacaccaaagaaaaatacagcatcatcaggaagttggatattgtaccgttaaaggcttaaagctactgttttagatgttgatattacgcatagagttcatattcatgcaagagatttgccgattcaggatcctttattatcttatccatctgccatcttaggaagagaaagagccattcttgttaatttagagcatatcaaagctataatcactgcagaagaggtgttacttcgagatctaacagatgatgataaagtgattctcattgttgaggaacttacaaggaggctgcttcccggaggcaaagaagatgaatttccttttgagttccgggccttagaagtagcattggaagctatttgtaatttcctcgatgcccgtacaacagaattgaagattgctgcttatccagcatcagatgagctgtaatccgagattagcagtcgcagtttggatcgtgttcgtaaattaatcaagagtgaaatgaggggattgactgcacgcgtgaaaaaggttagatatgagcttgaaaaacttttaaaagatgacggcacactggaggatctttagttatcgaggaaaacggcattatcatcacccatcagacaagcagcaggccaagtgctgcagcattttgtagagatgagaatgatgttaaggagcttaaaatgttgctcgagccatacttcattcaagctgacggcaccttgaacaaattgtccacactacgtgaaaatattgatgtcaccaatgagaatcgcaaaaatcagttgaaacagttgaagctcatcttagaatgtggtactttttgcgtcgggatgtattctgtggtgcctgggatatttggcatgaatatcccgtttaaatggaatcatgacccaaatggcttcatgtttaaatgggtgatcattgtcccaatagtggtatgtgcagcccttttcgcactgatcatctcatatgctcgccggaagggtcttgggtcttgttaagtcatatagttgaaaaaacctttcagtactaccatcttatgcactcaacctcaagagatttgttggaagttaaaccaagatatggatttggttcgaggatcaacatatgatgttgatccagtccgaatggatcaactgctgcagttgacacactgtgcgatgtttggaagtttgagttaactagaagagcaagttgtgtcgattgcttgttttagagttttactatatttagagtttctatatgtttctagaagtgtgatttatttagagtttgattttattaggaaattacattgagtgattgtcaagtttgtgagactataagtaggctgttaagccatgagagaatgtacacaccgaatttgattatcaatgtaatcgtttatttgcttccgcgtgtgctctcctctctcttgctcgatcctacatttggtatcagagcaaggtgagaggaagggagaggagaaggagaaaagctaaagattttctttcggtagtagacaattgttcaaagagaagttgcgcaaagagaaagttgaagagaagtttctgcttttggtgataaagaagaagtttggttgtttttgtgcgaagttctgatgagttttaaaaagaagaagaaagaattgctttgaaggcatgtcgacctatgttgctgcgttggtatttttaaggtttctagattattttaaaaaaaagtattgtttaaatgtcctggtttggttagcagttttggccgaaccaagactattgtaggctaactaaggtccaaagagttatgtctcaagaattagaagctcgagatcaacaatggttagtttcctagggctaagtcaagaagaaagccgtggaagtttgttgctgtaattgggtgattgttcaaagctagtatacccaaagaagtgagccgaagccattaatttagatggtggttgattgatgattattggtgctaagagatgcttccgattgaattccgagttgggatggagttgttggctgctgttttatcggtagaatttgagattgatggtggatcgagtattggcttgctgtaatgttgctgccattgatgttgcagagaaggttcgtgatgatgactgagaaagagttggagctggtgacgaaaaaactcgatggaagagaagagaagttgttgatggagaaaatcttgatctgtgatgtttgtagttgttcaagtttaggaaacaaaagatggtttcgctactgcttccattgacggagatatgaggtagattatgttgccctaaaaaaaaaagtgttattgaaggtttgttacagtatatgatgtgttacataagtgtgacagaggagttgttacagaacagttacagaggaattgttacaaaagagttgttgcagaagaagttgtttcagtggagttgtacagattaacagaagcgtgacaaaagaatggtcacagtttgtgacatcatatgacaataaaaacgtgtgatgttttctgtcagagacgttgcagatagcatatttgatgtttgttggtttttgggtaagtggttgattcgaagggttaagtcatggattcgaaaaagatgaaaggatcaaagttggtattgtagtcagaggattggtacagtttgatagaggatcaaagatggtattgcagtcaggagggctggtacagtttgatggatcaaagttggtattgcagtcaggactagtaccgtttgattaagggggtcgaattcagaagcttagaaaatgacaaggaaggattggatggttaagtttgagcttaagggaggatggtatcgtattaagcttaaacatggacattgaagagtttgtggcagaaacttggaaatctcacaaagtgtggaagactttgtgttagttattgcttgtggcagaagcataaaaaaatattgtgagagaatcttgaagaacagagaaatgtgaaagtttcgactctaacaagcgtgactggaacaaagaagtaagagaagtaatcaccagggggtgatgtgtgagaagacaacaaaaggaggttaatacctatgagttgttgagtttgagacgccacaaggttgtgagcataaaacaatattgtaggcgagcaaagtcgacaagttgagtgaagcaatcccattggggatttggctagagttgtgtgaagcaatcccagtggggatttagctagaaaagtgaagaaattccaaggtgaaatttgaagtgtttagtggaaatcctacgagtgaagtgggtaaacaagtgttgagtttgagctacaatgctcggtgaagaaaatttaaggtgagctataatgctcggtgatgagttattggttttgtgtttggttagcaagttgaatagagcacaaagaggtgtttctagcttgttaaaaatggtgttccgctgcgatgaagaagaaagtgaaagaaacttgggctggttgcgatggtatgaagattgttgttaagccaaattagaagattacttcatttttagttagtttgttgttttagtttcgttttttagtttgtgctttgttttttatttgagtttgactttgattgacggaattccggtgtgatcatgaagttgggatgagctataatcgagtatcaaggagtaaggttttgttggtggtgtctttgaagaagtatgagaaaagacaagaacgtgttaacatttatctatggaagaagaggaatgaaaaatgagaaaagacaaggacgtactaacttcgatcaatggaagaagatgaggagtagaagagggttacggaattctcgtcgaatgatatcttggtttaagcgaggatgttggaagttaaaccaagatatgaatttggttcgtggatcaacatatgatgttgatctagtccgaatggatcaactgctgcagttgacgcagtcaagttggatcaacatacgttgttgacacactgtgcgatatttggaagtttgagttaactagaagagcaagttgtgtcgattgctttttttagagttttactatatttagagtttctttatgtttctagaagtgcactttatttactgtttgattttattaggaaagtacttttgagtgattgtcaagttcgtgatactataagtaggttgttaagccaggaaagaatgtacacaccgaatttgattatcaatgtaatcgtttatttgtttccgcgtgtgctctcctccctcttgctcgatcctacaagattgaagcaactgagtctttcaccggaacacttctaaagtagctgttcatgggagacacttgacgacataattcagttctaaactgcaatcatcttttttttccctttggtttactgttaggttcttagtttgattggatttattttttaggttgatatcggaattactttaattaccttattaattcttttgattcaatcgtgaatgctagattctgattctttattaagctacttttttttagtgctaattagtatggttctggaatggatccgttattggagagtttccatcagtggaaaaagacagtattactgccttaactcttggattggtggtgcaaaaattttaaggtgaaatttgtggtaacatcggtggtaagtgtaattaaatgattgtcatatgtgtaacaatcttttatttaacaaaactagtcgtaaaaatccaaggtgaccaaacttgtggtacaaaaaccccactcaaatgttgggattcattaaaactccatcttaaactaaattatacaaaaatcccaaaattttaaaaaatagatacaaaaatcccaaatttcaaaattggtttaatcaaattttgtgatgaaaccaaatattggtttcgtcaaattctatgaggtttcatcaaaattttgttttttgggatttttgtgttgcttttgttttgacggattttttgtggttggatagtgactcctttggagttataactcgtggaccgtttatttaatctactatttattttcttgtgaatttgcatttactctagctgaaaaaaacttcaagaattcctctgttcattcttttaatggtagaattaggataatctcacggaaaataatcaaaagaactaaacatagctctgagcgttgtttggcgaccatataagtattgatgaactcgaggtgtataacaaagatcttcccttgggcatcaaaaaggaaaggaaaatcacctgagatagcctctaaccccttaatggcgggtttggttggaaggaatggaatctggaaatacaatttcattctcatatttggtaaatagatttaaagaaaggctagaaactggattcccaaaaagtaagggtatcgtagacccatggatggagtctgtggatttaggattcctcttttttggaaatagaattcttttcacaccaaccgaacaccgcataaaaattactggccggacactcatggacccagttgttcacacttaactgttatcaaggctaggcattatattactcggggcgcccttcatctttgctgttggtcttcgagggctgtgttagggtttgtgacatgttttagaagccaagtaggatacggagttcaggctcgaattactagacttttggacggaaaagattattgattaggtatctgagagtctctgaagaatcaggagttggagttctacaagaactttgtttaatctactatatatagacacctcaatcactctaaatttcttcatccaaatattctttctctgcctctctctacctgatggaagaacttttcaactcttcatcctcgcagatacattactgcttcctttttcaactgattctagggtttgcgttctactcgttaatggtatgttttgatcctccttagagctttctgtgtttttgtgtctttctactgattttcaaagaaaaaaaataataactctctctgtgaagaaaacaaaaataaataaagatgagtcgagaagggcatgtagtaattccaattgatacgataatgaaaaatatagcagcagcagcatcaagaagctggatttcattagattctatcggtgaagctggatttcaagattagatgaactgagatccaagcctactagtactcgcagcttggattgtgttcataaactgaagagtgagatgacaagattgattgcacgcgtgcaaagggttagaccgttagatacgagcttaaaaaacttttggatgatgacggcgacatggcggaactttacttgtcgaggaaaatggcttcatcatcatcacccattagtagtgtatctggagcactaaacaggcttcctgcttcaactttcaagatatctacagaaagtcggggagttgtagaaggagatgagaatgatgttaaagagcttgaaatgttgcttgaaccttacttcgtgtaagttgaccacaccttgaacaaactgaccacactacgtgaagatatagatgacaccgaggattacattaagattcagattggcaatcgcggcaatcattttcttcagatggaggacattcgaagttctggtaattttagcctctcgttgtataacttggtgaccgggacgtttggcatgaatatcccatttaaatgcaatcaaccccattatggcttcatgtttaaatgggtgatcattctcccggtagtggtatgtgtatccatttttgtactgatcatctcatattcccgccgccgctacaaggatgatgataacgggtcaaagttgagaaaacgttaaccatcttaggcattcaacctctagagaatataattaggttgatcagagtcgaaacagcagagtctttcacttgaagactcctacagtaacagtttacgggagacgtttgacgacataattcagttccaaactgcaattacctcatttctttagatttacgctagtttcgatttgatttatttattgaaattaatctttgattaccctattatttgttttgattcaatcgtgaatgttagattctgattttttattaatctacttccttttagtgcacgctaaatagattggatttaaatgcaaatatttgtggacttgcaaacagtcccttttatacgctaaagttagacattgtgcttaaatttacctgaatcatgcatgcatttattaattgatagtaatcactgtatcatctgcaggtagggttgctaagtgagaccacagtcaaatcatctattttttctagccgacagcacctaaatcaccatacattagtatcacataactgcaatgaaaaggatattgcataaacataattaagataaacacaaatacatgctgatcaagtatttgaaatagatactcaagtacatgcgctctccaacttaacatttaagtaataaccagtacatatcacacataactaacactatctggctagtttctttttcccccaccaaggataatgaagtagttaatcaattagttgttattgttgaaagtaatctctgaattagagatgactaggggaaacatcccaacaagggagtgaggttgttgaataatagtcctcctcgtcgaacaaataagtattgcatcctaaaatattgctggttcctccttgtcgcatatcgttcaaggattacaacagacatcctcgtgcttgtggtctcagcgacaaagtaatttttatctgcttctgttggtgagacttgcgtaatgtatatcctatagaaccatgcatatacttgtgatcctcaagcttgctttttagtttcataaccttcatacagtaaagagtttaagacagtagtgttaagctaagtaatacatataatagctatattttcacacaaaacgggtttgtgttttcatttgttgtcatttgaggcatttattacctcttgttggagatgctggttttccctagagacgatttcaaaatcctgcttatagatgttaaattttctttccttctagtctagcacgtcgattttgaaaccatattgctacttggcgaggttgcagccctaattccctggacaacttcattttcctttccggttccagctttacctaatttttcctttcattgagagtagcgtccagttgttgttcctgctctatctcctctcggaaactcttctccaatgcatctacttgttcactagacaaccgtgtcttcctcctcctcatatccacttggttattgatgtttgcttcatgacctcccatgccattttcagccccgcattcattcgcactactagaccataacttcatcatctctgctcccaccaatcctatacagattgtaaaatattaactagttatagagtaaggcccgtaagggtgtgtacaaatagtttaatacggaagaacgttaaaaaggaataaaacttttaagcagccacaaaatattcaagtgtgaccgtgcgtttatatacatggaaaagaacatagcattagacagaatataaacctggaaatggttgaccaaaggattcatagtggaagctgttatcatgaagaaatgtaacatgattctgttgttggtgctctcctcctgatgttgtactagttggggaaggaattttaggactactgctgcaattgctccaattctccatcaccaaaattgatacaaatgtctattagattgtgttgcgtactacactgccatactaaacactagactagatactaaatataaccaatagtttatctatccatacaaatgcactactatatatatgctactacaaacattcaggtgagtattttttatagcaaaactagtgatttgctgtagtttggtaatttcatgcttcaacatttatagaagtaagcctcatgctacaaacatttgaatcataagtccaatttcggtggtcttatgattcaaatgtcatcacagcggtgatatcttggaagtttaattggggagatgaaagacttagtaaaatatggaataatatcccgattgtaatatggtggtgtatatggaatgagcgaaatgcaagagttttcgaaaaaaaaaagaaaaatttggtaagcctcattacaaatgttaaactccaagcgttcttttggacggagtcgaacagaaggatgttaggtctaacggcgaatacggtgataacgctttgggactctttattccggccgtcgtaatcttgttttggttttgttttgggttgccgaattccctttcgactcccttttcttgttgcttttgtttgttttcatggggttgagatacccctattaagtacctcattttcaatgaatttcttctttgatcgatcaaaaaaatatatttatagaagtaaacgatgtgtattgaatgggagagagacaaaaaaaaaaaatctaaagtgaaagagacaagagagatttacaagcatgcatcaaaggacaagagagtacaatcacagataaattgagatggaacgaagagagaactaagatttatagctatcactctgttgcatgcgaggtcgcactttcaagttactattgattagatggatggagtgatgacagagtcagagtaagaatcagtcataaccgtatggaaaattgatgaagaaaatatctttactaagagcaattcctacgtgaatgaacaaacccattcgtttattaagtcaggtggatgatcaaattaggttttccactatggtaaagtattgggcgttagatcaataggcgtgcgatccaggtaaaacgctagcgtcggtagatccaacgctggcgttgaaaggaaaaacgttggcgtcagaagaaacaacacggcatcataagataaaacgccagcgtcggaagaaacaacacggcatcataagataaaacgccagcgtttttgctacaaacgctaacgggtagttttttaaaattcgaaattcactttttacctctataaattacaaccatcttcaaacaattcactcacaccaaaattcacttgaattttctcttgtataatggctgaaaaggcgatcacacttttttgcgatgcaaaacttgaagctggttatttctaagttgtgtgggaattttgaaaagattgaaaattgtaaaagggtagtgcaagttttagaagtttctccaagaaaatgttccgctaaaaggcaaagaagagctccagttttgaaagttaacaacaaaaaattcaaaaacaaatgtgaaactgtcaaagagcacgttgaatggaaaatacgtcaaatgaagataaataggaggccaaaacttgtacttgatttttattgaattttttattattgtctaagtttatatcttgtaaaagaattggcagtaatatcaatgaatgaaagtgtttatattttaaaatagatttccacttcagattaagtgaaatttattaaaatttaaacttgcaaataacatcaaactacattttaataaaccacaacaaacatcaaactacatcaaatccgctttcttcggtaaacttggtctaagagatggttttctgtaaaacagttaaataacaagttcacatatttttatgatgcagttgaacccatgaggacaaaggtaagatactcaccatttcttcgttagataatccagaatttctacgatgaaccatccacaatacttctgtataatgtttaacttccttagtgatgaataaaattcttagttctaggcataaagaaaatggctaggattttgatctctaaagactaggcgagctcactagaccatcttcccttattacttcttccttcgggggacgggagttaaggcgaaagaaatagggacgttcaaggaccgaaagaatcgaagtccaaactagatagagggtcgctgctccttaactggtcgagaggtgaagcttactgattcttatggcttccttccgcgatgctactaaatgtcctaatactctttcccagaaattgtcgttgttcgttggtctcatcatacgatgtaaccaacatcgaacaagagcaacatcttcttccatcgtaaataccggaagcggcattcgagtgcagtaacgatgttcttgagatggaccatcttttagaattctgaaacacgcttcgtaacgaaaaggtttaccatgagcttcctcccaattaccaagagttgtttggatcacttcatcttcaataacaccgacgaactcttctcgatcaatttccattaccatagtaagaaatggctggacttcaatcctaataaaatgaaaacgagaatgcaatcgacgagcatctcggtttcctgggtttcccgtcagtgagacgaacattgaaaaaacgttctcccaaaaagaactgtcatgagaaataacaacaccagtgattaccctatgaaagaaatatgatttgcatagagttatatcctcttcttgagtaaacttgggaccactatttctaatagacatttctgtcaaagagggggagagatttaataaagaagaagaagaagaagaagaagaagaagaagaagaagtgattttgcagatgggaagaatgaaatttataggtcgagaaagaaaagagagccgttaggaatttttccgttggcgtttgaaataaaagcgctggcgactttactaaaaccgcccgtttgaattaccaacgcctattttctattataaatacatcactaggttttattctaaaccaaaccaaccgatttctttctcaacatccaccatgttttctaaaggaaaagcgaagaaaatattatgtgtcgaagaaaaagaggtttgtccattatgtttcatggataaccacagtcatatgcaatgtccttggatgtattcaaagtatcctcgggaaggttgttcatgcatcagaatggtgattgtatcacaaccggaaaatctcaagtatttgcaatgtcaagatcccaattttccagaggaacgacgtatgctccatgaagattaaaaaagaagaagaagaaaagattgcaacactctgcaaaaacttcaaacttaaagccaaattgaagaaggagctattacactacaagcattgtggatatggagatcacgaatacaaatattgtccacagagaattagtgcatgctcaaagcccggttgcaagacttttatgcatttgcagacttcttctgaagaagacacatatggaaggaatttctgggaatgtcctaggtattttttggtggagtgggctgattaaagttgtatgacaaatcgattcactatgctattacgattaatcttcacatttgcacgtcaataatttaaattttcctagattaaaaattgcaccatcataaataaaaacgtactgcgttgaacaaccaccacatcatacatgaaaataaaagaaatacattagattaaaacaactactacatatataggcgtcaattctcagcgggtggtggaattcctagagtaggggattgtatatattgagcaccataagaatgttggaacgagcatggaagtcgaaaggacgaccgcggtgagttactggccacgtcactagagttcttggttcgacttcatcttcggcttcaccgttgagcttctttttgtgattctccatataaagccatgaattccaatacattcatactaattacactaaaacgatgttgcaatccatgagaatcacgcccatggatgttaccagtttcagcggtgaacactctgtaaactttctcccagaaagtcaacgtcgaatcggctacattacgcatgaccgcatctggtgtgtgaaaaacaaaggctctacaaaatacctaaatcctcttgtttagtgaatctaacaacatgaactccgggaggcacttttgtagatgatttgagagtgaagaatgtgtagaatgtgtgaaggagatgaaatgaggagtatttatagaattcagaaaatgtagccgttggatcacaagttttttcagccgttcagagtgagccgctggcgccattgggtcagacgctggcgtttctattagggactctggtgctttaagtcaagccgcgtgttggacgtacaaacgcagacgttttttcttcggacgccagcgttggtagcaagcccgcccgtccttaccacaggcacgcgttggtttgtccgtctctatgttcaaatcaacaaatatattgatttgaacatccatttttcatgtttatttattccataacgggagcaaaatgaacaaactccaaattcgttcattccataaaaactgctccatggcctgtacaataccaagtacaatgtgtatcggaagacaaatcatcattttaatatttcagaataaaatacaatagcaggtacaatatggatatgctatttatatttgagtctatgacataatctatgtgcagtaagcagtccttttcatatgctatccaacggtccattatgcagtatgttatacgacgtttcacgtttctccaataatttatcgcgaagtcccaaaaccaatatatatcatcatcactagtgtttaaccggtgcgttgcacgggattaagtttactatgccaaatttgtcaaccaaaaaaactgacagtggaaattggcatcatggttcctctatttatttatttattatttttttaagcatctctattttttttttcctgtgtaactcagcatttttttacctctgtgtatgtttaagttcataaaggtagctttctcatttattggctaattttctttaaaaaaagtgtgaacttcatcatcactacgcatcattcttcccaccgaataagaaattaagactggaaaattttataatggatttgagagagctaataatccgaaaattccaagttataatggctttatagattataaaatatgagaaattgataactgcaactttacaccttgatcacaatatcacgtgggctcttatatcacggaaatcaactattgcagtccgtttgttggtttattgatgtttcttttgtttgatcgctaaacctccgacttctgctgcattgggtaccccctacaatcatagtaatgtactgaattcttagtggtgaagatattagcaacctgggaagacgaaggagtcaaggaaccatgacgtgattcagctaaaaaatgtgaccgctaaacctccgacttctgccgcaattgatatcccttacaattatacaaatttactgagttcttaattagacgatattaacaaccaggggagatggagtcaaggaaccatgacgtgattcctctacaaaagatagaaaaggatatagagttagtattacacctataaaaggcatatcaaaatagtgcacataaacataataagggagttcattctaggcaccgttatcttagttcagtaaaagttgctttcattaggcagctgcattacaattcaaggaattcaattgtactaacttcagcaaattgacagcatagagacaaatagtagtgtgttctcgtaacttgaattgggttagtaattgtacatcttatcagatgtgctcctgaaagcagtaaagagtggatgaacaaccactaactcacttcagttaggaatagtctgtattcctcacagtatgcatggtcggattacatcttcttaaatggagtcctccattaataacccacaacggatgcacatgaaaaccaagaacaaaaacacaaaatctaaactaccaaactacaaaaaaaaaaagcaggataagaggaatttggagcaggttagtgaaattaagacatatttgaagttttttcgtaaaggtttggttcaaagtttgtcattcatctagatatgccaccaaatttatagttttataagatcgggtgactaataatggtacaacaaagttgagcctaataaatagattgagattgaattgcatactatttccagttaatgatcataagaagaaacatcgattaaaaaaaagcacaaaaagaagcccatgttaggattcttcttggctggaacttactaatttccaactgactaactcgagtgtattctgggtcttgggtagaaacaacagatagaaaaaggaaagtgatgaatttaccttcaacaactacacgatggaaaggttgtcactcaacaacaacgtggaagatagcaagcagtactggcgtaaaactcgtttctagtaacagaagttgaattggtatttctgtttctaattacagatgcttccaagagcgttgaaatcaattagaagtagaaatactaacacattcagctattagttgtattttttcctctttagagatcatttttgatgctcctaaagtgtatgaatgagagtggggcccatatttcgtggccaacaccctcaattttatctgcatacgccatgagtgaatccaacctcttgctagcttgcaaccaagaaaatagtatactcagcaacctcaataatccaagaaaatataaaccatttcaaaagcaggtagcataatccatatttcagtatacataacttgtgagtatatactataactttgttagtacgactcggaacatataattggctaaaatacagacatcactaataccttgcgtggatcttaattggataaagaattggctatcatccaacaaaagatttgccatgacacacaaaaagggaactgatgagcttacgcccaaacgacagtaaaagaagttatatcttgttcaaatcaattggtgtcattaattaattttaagaacatgggatatactaaaagaatcttggagcaatttcaaagtacatacctatgaacttcacgaaagaaccaaaatcaaaataagcaggcctaatggagacgacaatgctgatgccgcaagtgagatatccttaactattatttcaatactatactaaatggcaatatgagaatgaccataacattaatatagaatctcaaaagtcaatctgtagtgcactgcgaagagatatgatgtaccaagtatacgcccccacttaccactgttatgtaccaagtatacaccgccacttattactgttatgcttcattattgtttttggaaatgcctgccaactccatcccgcagaaccacataaatatgactatatgagtttcaaatacattcctcataaagatagtctgacggcgagttagaaagcaagtcaaatatagaacaatcgataaccttaaactggattctttttgctaaatacagaaggtgggaataattacccaccttgccaagtctacctggcttggatttggaattaaatccaagtcacggaaattaaatatgcatatagataaactaagaattgggatttccctgtttatacttgtctgtgtcccggtgcagtgcaagaaataagttgaatatggtgcacttcctcatagttacctgaagtaacccagttataaattttcccttttcgtgttatatcaatgtgcaactgctccaaagcaccggcaacaaccatatcaagtttttcttatgattccaaatctgtaaagaacccattagaggagtgaaaaatatggaaaactccaatgtagtcgtgcaaatatcacaaatgataaacgagaaaccttaaaatcaagaattgacaaactcccatgcaaattccgaatataagattgatattgaggagatacttccagtgtatcagatactgacagtaaaaaaaagtttcaataagcttcaatatatccttcagctgcaagtaaaatttaagacatcttaaagtacgaatcattaccaaaagaaaatctttcaatcctaaatttcaatccctatagtgaactttagttaccatcattatatctaggaaaaagaacaaaataagttgaaaacatatgcaggtacactaacagaacattacctagaaatatcttctcgagattaaaaaatagtagttaacatataattctcttctgctagctcattctttctcaaaacaatcaagttcatgaaaatgaaagtcgtcaaatataaccggtttcaaaataataactttgtttactataaccccatccatgttgcattacaccattgtgtcgtgccactggttgttaatggaactcatgagcatcacattaccttaatcgacaatttaaagaaaatggtaaaaaaagaaaaatagtagataggaaagagttaccaacatcatgaccatcaattcatttgcaacaccaattctgcaaatatgcgatgagctaccaataaccacattatgattaattaggttaaggctacattccagtctggacttcttacataaaagtaataagaataattttaatttcttgatataaaagcatcagaaccataagaaaggaaataataattacatcttcaactttatagcacaaaacataccacatatttccatagcaattgcagccaaggtaatccatacctaggagatactttatagacctctccatttcagatagattctcattgttatccttcagcgtaagttttttaaacaaacttgaaagacatgaacccatgttacatctttgtgcaatattttcaaagaaaaataagagacaatctgaaacgaactataagctttcattccataaaccacataagcattgatagaaaaaacttaggtatttcaggtccatgatacggcgaagctccttagatgtaatttcacctgcacacgaagaagaagaaggaaaaaaaaacactaagccatctgatatttgatcataaaaataccataaagacaacataactcgtaaaggtgaaaaagtataaattcctaaattgattgtcctacgtatgttttgatttatcattggcgtatcgcgtatgtataactttacatactctaaccgaacaacaaacattctaaacatcagatgggacaaattcaagtacaactctacaataatagcaaattgaaagtctaacttaaaggagagataactaatgttgtactaaccaaaacagcagagaggagcttgtccctctttgatcagttggatataagaaagtactggaatactcaagttattaagaagcataacaggtgcaaaaccctaatattttatatatagcttctgcttcaaatgatttgtttcaacctcaaataatgatttcaaaaacataatcacggatacttacatcatgatgtccgttactttatcagcaatagtacatttttcacaccaaaaccatagttgaaaaagaattatagaccaacgcaggaagattactatacagaaaagtaacaactgggagttttttcttcttaggaagtactgatcacaaaattgacgattgaatcaaaagattttaccctaataaaattacaaatcaatttatctaataagtaataaaatcgaagcttttcttgtccagtgctagacaccattgtataacagaaagggaagagaatatattcagaaaaggggagagacatagaatcaatcgatacggcagcggaaagtgaatagaaaagagaaagattagaattagggttttggttttgataatctatttggttggccaaaaatcaccgaaaatatttcaaaaccctctaatcttattggttgggggccagaaactctagaattcaagcttttggcctaactttcactctggagtcaatatttcggtctcaaattatatatacaatatctcatccgtgtaactatgttatggacaaaacattataagataaagcctacttgtactaacggtcatatatttgtgcatttgttgttttttccggtttagttgcatgcattatccaggcttacggcttacttacgtgcagacactttttccctctctaaaatcactttcggtaagaactttactttgtttatataatttattgggaggttaatattgcaatacagatttttgtatatgatctgcatctgtgtggctaggtatttcttacaactacactccacttaatctgattatatctctatgtgatcatcatggacaattattttattgattgaatattcaaatcacttacaaaatagatggaaacctaacaacaacttttcttgaaacctaaactcactttctctctcttccaatctctcttacaagacttgtcgcagaatcctcagaaacaatgactctttcctttatataggattttacataatggatgacacctaagaattcctttattttcgggatcactatgcgacatattcgctcatatacaatctctcatcttcgcataattcctcacactttacccgtgactttgctgacatcatctggtgtgtcatctcaatttgttgtgtgcgatgctcctcgcgtatgttgtattcttcacttcgcgtagttattaacgtgtgcgatatttaactcctacatttgcctcttctcatgtcgcttattcttcaaagtgagcgatatgagaaattcttcttttttaattcgcacatgcctatctctttccacttcactgtgccgacagttatccgggtttcaagttcttcttgtgtacgccacttatttttaaccacttattttttgacacgtcttttttaaccgcaagtttttattcgttcatttcttcgcattaatgagagtaaatcttgaaaaatgggtcgcttttccctatatattcttgtttgtatggtaaaattacttctaccgcaaacacgaatttctttatgattttgcggagaatcgaatcgctgctccagacttcaaatggattgagtaatggggaggggatacctgcaaaaaatcctacgatgcttaagttagcaagagatttttcacatgagtttttaatggggaaagattgcataccttttggggttgtgaatccccctatttatatgatgccaatttcagtttaatatctttgattttatgatagaaattaattgttgtaactgacccctgcatgcctcctgtaataactggccctgcatgcctctctctcattattgaccttgcatgcctccctgttatatcttgcattgactggtccggcatgctaccagaatcttccttgtgggctgtgaaattagccaaaccaaaatggtgcaaatggttggcctaacaaattagtttacatgccaagcccaatagagggaagtgtgcataagcccacaagggaggagtgtgtataaagagggtagaattcccaagcccacaatgactcaactcggccaatcagtgagtcaactcggtggggtgaaaaaatcctccagtgttaatctctggggagtgaatatcctaggagcatgggagtgaattgtgttgtgttgcactggatcaggattactgaattaagttgctcccgctacaccgaatcagggttgcggtattaagtagcatcgtgtcagactgaatcacaccaacttgtcggcgtcgtctactgccgttcgccgctgcccgcctgctagtgcaccggcgccggaccgttaacgctgactgagaagatgatctgacgtcatcgtgatgtcatctgctggcgccatgctgacgtgtcagctgttgctgacatgtcacacccatgttcgttttatctgctgacgtggaagttgacatggctggttctgctgacgtggcaggttctaattgggttgttttgttgacgtggcaaactgctgacgtgacagcttggtgctgacgtggcatgttctggttggacctttctgttgacgtggcatgttgctgacgtgccagcttggtgctgatgtgtcgccttctgattggcccacgctgttgacatggcatgatgacatggaagtgggtgatggggctcttccttagcttgtttctatgcacatgggtttctcaactgttgggggttcagcaacgtcctctcccacatatgattatggagggagagggttctgtaattgttatttatgctcgactcgtatgatttgattcctgctaacttctgacttcttgtactcgtccattgcactcttgtgacacttgtgggcggccatctggtcactcttaactttcacgactccttcagggacaagaaacttcaaacattgatgataagatgatgtgactgcatcgatctcatgcagccagtctcgacctacaatcgcgttgtagggagccctacagtcaagcagcaggaaattgcctagaacatacttgtcaaccactgttataggtatcttcacttttccaatcgcgtttgtaacttcgccgctgaaaccgataattgtattttcatcctcctcgatcaagtcgtgtggaagattcataaaggaataagctcctgaaaacagcacgctcactgagctgcctgtatccactagaatccggtgtacacgaaacatgccaatccaagcagttataacaatagcatcattgtgtggagcatatacacctatcatgtctgctacagagaactcgatatttgtgcacccaagctcccgaatttctgctccattgccgctgaaaaaatcgatttgatttgtcaagtaccattcttttagatgcctgagctttctcctggtctcatcttctgatgaccgcctggtcattgagtggatcctggcgtgactgacgttaatcacatgcgagttgatcacatgtgttgtgccaaactgtccaggacctttcccaaaatcctttttcacgtactcttgtagctttccagcgtctatcattcgctggacctcgatctgtaaagtgcggcaattctcagtcttgtgaccatggcctttatggaacttgcattatttgctcttatcacatttatcacgtgtctctgctggaaaagggcgaggggggctcaaatccttgctgattttctcatacaactctgcaagttgtctgttcaacggagtcagcttcatatcatggtatttctgggatccagcttccattcgttcactttggttcttctcccggacttcacctcgatcattgtgttgggcgttcgaacggttcgtcgacttgtctttcctcccattatttggatgattggatgatctgtgaacatatctcgtctctcgagctttggaatcatcctccactcgagcgtatttttccactcaatcatacagtccttccagagtctatggtggtctcttgaccaaggaaccgtatatgcctctttgatcatactggtacgcctgtttataagcttcgatgacggtttgatcgttggcatcatctacatctgctaactcttgcttgaaccgtcgagtaaactgtctgatgctttcatcctttcgaatttctagaaggaacaaatcgtggcatcccttccgatcacgtctgttgtacttgtagtgggagcaaaattctccaaccaattcatggtaagtaccgatcgactgtgcagggagcttagtgaaccattttattgctcctccagccaaagactgtggaaacattttacgcatcaactcatcaatgtgctgccataggatcatggcagtttcatagtgtaaaacatgctgatctggatcatctgttttctcatcgaattccggcagctttggaaccagaaaattcacaggcggccggaaatctcggatattcagcttgaaagtggctcctgccgatcgatgcaatcggtccatcttttcttctctggattgctttttcgatattactttctcgatcatcttggtaaggagagcttctgttattgcgcctatgttgccatcagagaaactgtcttccttctcataaactcgatcctctagaatattagctttggatcttttgtttttcccatctctacctttctccgaacgagcatagtaatcgtgcgaaaattctctctcatcgtgccaatatcgaacctcgtcatcgtcatttctgaggcgttttgaacggttggtggttcaggcctcactatgctgagttgcaactggtctggtccctgctcggttaggtcgtacatgccttcgtttaggaaaatctccagtaggcaacagattgatctctggtcgatcaagattgatcacttctctgtttgggtctgcatcttgtgggctaattcgactgcctaggcgtttccatacagatcgaccccgctggttgttcagaataccagacctaggtcgaggctggttttcacgttctaacctcagcaaagcattctcctactccaattcgttcagacgattgagtaacagttcttcctctgtactaggagtcgcagttcgtccgtctctttggtcctctcgatcgtttttcctccttgacggactgccaattgcacgctctctatttcctcgaacctgtgggttttccccatctacatcaattcctccatcttcgtttgctggttgtttttcccttctccgattcagatgtagagttctgtcacggaagcgatctcgatttcatccatgatccagggatctgttgtgagcgcgctcttgaccctgcctgtttccagtgggtactgttggagctgattgaatttcaatttcgtgctcttcagcttcacttctcctgctatgttgggaatcgctagtagaatcatctcttcgcgcagtttttctggttactgccataactcgagctggtaaaacactatgatctattctcgaaaaccttagccggcgccaatgtttgtatggtaaaatcacttctactgcaaacacgaattttttttatgattttgcggagaatcgaatcgctgctccagactgcaaatggattgagtaatgggggggggggggggggtatctgcaaaaaatcctctgatgcttaagttagcaagagatttttcacatgagtttttaatggggaaagattgcataaattttggggttgtgaatcccctgatttatatgatgccaatttcagtttaatatctttgattttatgataaaaatcaattgttgtaactgacccctgcatgcctcttgtaataactggccctgcatgcctctctctcattattgaccttgcatgcctccctgtcatatcctgcattgactggtcctgcatgcttccagaatcttccttgtgggttgtggaattagccaaaccaaaatggtgcaaagggttggcctaacaaattagtttacatgccaagcccaatagagggaagtgtgcataatcccacaagggaggagtatgtataaagagggtagaattcccaagcccataatgacccaactcgtccaatcagtgagtcaactcgatggggtgaaaacatccgccggtgttaatctctagggcgtgaatttcctaggatcattggagtaaattgtgttgcgttgcactggatcaggattaccgaattaagttgctcccgctacaccgaatcagggctacggtattaagtagcatcatgtcacactaaatcacacaaacttgtcggcgtcgtctactgccgttcgccgctgcccgcctgctactgcaccggcaccggaccgttaacgctgactgagaagatgatctgacgtcatgtgatgtcgtctgctggcgccatgctgacgtgtcagctgttgctgacatgtcacacccatgttcgtcttatctgctgacgtggaagttgacatggctggttctgctgatgtggcaggttctagttgggttgttttgttgacgtggcaaactgctgacgtggcagattggtgctgacgtggcatgttctggttggacctttctgttgacgtggcatgttgctgacgtgccagcttggtgctgacgtgtcgccttctaattggcccacgctgttgaaatggcatgatgacgtggcccacgctcttccttagcttgtttctatgcacatgggtttctatttagagtgcttgtgaggcctagttagccatacttggctaactagatgagcatattaggcccattgaaccatatttagttatagagaggagttttctagtcctaggtaagcccatttttggtgtagaatatttagggtacaaacaattctctttcccatatattttattcttttatcttcttcattctttttcaccttctctgcaaattcatattcttcattgtcattctttaatggctcctgctggtaaaaagatggagatcgaatttaacagaatgaaaaccgactttaatcaaaagggttatgaaatctcccttcctccttcatgtaacttcgcatccaaacttaaacttgatctaattagatctgagcagtgtagtaaccagaaaatcatcgtttccttaggtcaacttcaatctctgccaattcctttatataaccctaatattcctttgttctattgaattctttctgttgaaagattcgcatggagaatatttcagctgagtggtgatgctattaggatacccttagagtatgctcgtcacgcagctggtcttggaaattcttatcccgaggaagtgcgaaaagaaggtcatcgtgtcaaagtcatagatcctgctgagtacactcttgataatttctttaagaattattatatcgctattatgataagtaacgtgactaaatgggttgttcgcgtaaggagagcagatggtatcgtcgaagatgataaaataatgcgagatgtggattggaattcaaactttaatcgtgctgctcgcagatctaatgattccagttgtcttaattgccctgtcatcttgcaatggtcctttgtatctggtagagctgcggatggttcggacaatcctcttcccgaagattttcccccttatcaaccttgggaattcaaattactcgaaaatgaggaaaagaaaataatggtatgtgatcctcttaacccaatttgtaaagctttgtaactatcttatattttatttcttctctttcgtaggatgcctcaaaggtcaatacttcgctcaaggtatgaacttcgcagaataaataagtaagaaacacacttcctattttaacaatattgttgcctctgtttcttatcttgattattcgcgcacgtgaatctgttgaacgagaaaaatttaggaaaaagcaagagaattcctaagaaaccctcttcaaaaactttacccaagaaaacctcattgaaagaggatgtctctaggaagcgtgcgagacatgattcttcttcaagctctgaatcttcggatggaaatacctttgcttctgaagaagaagtttcgattgattcgtttcgtcagaaactgtctgatcttttttgtggagatgctcttgctactcttgatgatgatgaaagggaacgtgccttccaaatgatctcaaagatttgtactgttcctgatttgggggatcgatctcttcgcggagtttcctctgcgataaatttagattttcaatttgcaatgaatggcttggtaatactctacaacatttatttttgaacttttccttatttgcaacatttgcttatgatatttttatctttgcagggttcccgcatttcttaggcaatttctttagacaatgatagaaaacttcgcaagttacaagatgagaataccagactgaaacatgagaagtctactctttcagatgcgaatgcgaaccttgcgaacgagaattcaaaaattagaaacgagaattcaactaattctcaattggttctctggtagagattttagataaccaaaattagtgattaaatgaaacccagttatatccgcaagcgcacaggtcaatagtaatatagacagcaaatgcggttcgttcccacagggagtgtgaaatactctaccaactaataccaaaaattaaataatcaacaagataatgttttaaggatttttagaaattcgtaataaaatgaaatgacaaaataatttaaagataaacaaaacgagtatgggttattaggattttcggtttccaccaattaattatgcaaactctactaatctttaaaagtatattccatgctttttcaatactgtttctccgctatagttgtcttcgcttcatgagtagtgattctaaagcattacctatcttcgcgaaacggccgtctagccgcgcctcctccaatatattttgaaacaacacataaatatagatcacaaatgaattcacgtttttcttcttcgtcgccacatcacctcccaatagaagtctgccacatgtcatgaaaatataaattcacccaatgatgttgtgccgcgtgtcataatatgacgagacattgtaaagtatcaccgaatctccactttccatagtatatgaattttatttagaaaacatgatattttcttgcatgtgctgggtcccaccttaactatatttgcaaaatgacgccagttggcttcaaatattcctgcagattctttttataaatatagcaagagaacttatgaaaggaaaagatatattaatctttcctttttcttcatttgcacgtggtcatggaggtgatattcttccattcttatgctaacaataataaagtcactcttgaccaattttaggtggcattagtgtgctgacatcaactcgcttcaccattaagtctcacattttgatgtttattcgctagatgatcgaattcacttgtactttctgcaaaagcactaaaatagtgtcattagtcaaaatattgagttctggataatataaatatgggtataaaatgtatcactttcgtgcttatgattctcctagatcgagaaagaaacaaggaactcattggtatgtagctcatactttctcactctttttctttcatgtgatcattcgaatttcttacttgattgtcttcgcagacctgtataacctttcagatgaagcggctaatcttcccgatgctgaaactcttttagaacatctcaactcctctttacgtaattaccccactcgaggatttgaaaaccttagcttagaagaattaagattaaaatatactacccttagagaacgccataaaaatgcattatccgcttcgaacaattttaaacgacatttttatgaggagaaagaagcagttcaaatattggaggcgaagaagaacgatcttattactgaaaaagatgaaattgctcttaggggtgcgaaagcattaaaacaatttcatgaatcccttattcagattaaaatagaacatgattcagcttgtcgtgagagagatattcttgttgaggaaacaaattcagttcgatctcaactccttataaaaagtgaagttgagttcaattgggctgctagttctgaacgatgctagaaataattaaggtgtaaatgttagtcttcatactgagcattctatattggtcgcagacattatttccaattatgaaggtcatctgttgttctttgatcatcatttatatatatcatttttttttgttaagaaatattgtctgttatcttaactcttttgttaatgcttcgcagagaaagagaaggaacaacaaaagagaatttcagaactagaactcgcttagctgctaaagaagaagaatcgtctgctcataattcaaagtatcagcaactgaagcaaaattggtttaacttagtccagaacaacagtaacgattaatcgttctcgtgaggctgttgttaagagagtttttgtagataacgacattactttgtcgaagtaccactttccagtgatccctgaaaatgttcctattcctgatatccaagttactgatggagaagaagattctgaagaggaagttagtgattttgatgaggaagatgaaaattgattgcttcttcttgtttgtaatcaattatacttgtaaattcttgtaaattcagcttttatctttctaatatgatccttcttttcttcgcttcgtatttgtgacttcttcatatgcaagtaagactatcaaaatgtggccaataacacttccttcgcattcccattcttgcctcttgttatttgtcgtatctttgatataccaaaataattgttatcttttatccagagattctcttggtgcgagcatatgggaaacttttagaattaactttatgtattattcatgaggtcttatttgggccttcctgtgtaaaaggtcttatgttgcctcttttatgtgcgatgaaatcgcaggcagtcgttacaccatagtgtattgacccattgatcccatcttaccattttctctttgtattatttcctcttcaggtcaattcgcataaatatcacaagtcttaatactcccatgagtaaaagtcttgggacatttacgtattttgacacaattaagctccctaattgagggtacctctatctggttaagattatggctcttcccatccggcttttcaacaaccagttgatttcgcaatctcgcatacactacctatagggtttatggcagcaagatcgcaccctaagtggggtatcttgggaccgagtgcatcatagtcaggacttgtcaatagtggaaaggtacgctccagaagtcccgggaattcttgactcaaccgtgtacctcggcgctctgatcgagtttttgcactccttaggagagcctttctcaccttaggctctcaatctaatattagtatcttagactgaaaatttaaggtatctctcccgggcattatcatttaattctcaccccaaatctccacaactcaagttccggagtcggtgtagccttcccttgagtcatgccttctaggtctttccaattatgacgtgcgttaggtcttactattttgcctcttgcatatgagagaactagggtgcactccatattggattcctagccaatctgataataagtatcattttttgtagcctctttgtattttcttattatggatttaccatatgaatttaaagtttttcatttcattcaactctagtacataaatgttgttattgaatcatcttactcaaagaaaatcatacacattcattatatgcatttgtcttcttcatttttgattcttccgaaattcgcacatgtttataatcattcgactggcattgtgcgaacatccttatgccttccaccttatcatgttttgtctccacttattttgttgctcttgttgctattcatctgcatattttattatccatttttactccttccgttattgatttcttctactaattttcttccaccatgaactttccatcgaattttgttatctttcctcctagtgatttttgatgttaaacattaccatctaatcaaacttcagtatttcacatacttgttactcaacttcatatacttcctcatacatcaaccattaatctctctgctcttttactatctgctgcattcttttgctatttcttcgcttagactcccttgcttcgcatctattaatatcaatttcttgacaacttttactttcaactgtgtcccctcttataattccaacacccaacggtaaaggaaacttgatatactgatgaaaagttgatgcaacagctagtctaccatgcatctatggtcttcccattagagcattatatggtgattcaacatccactacacagaatttgatatctgttggtaagctttgtagaagaattctcatagtcacctccccttttggtttgttcgcagagctattaaaaccatagattttgtatcttgaggggatcaattcatcatctctgccacccagtgttttgtatgtgtgataaaatagaatatccacagaacttccagtgtctataagaattttatttatcgcccaggtgtttttctcattttcttcttcatcttcttctaatggtttttggttaattcccaatcttaccaccaacgggcactcatgtgacacttctccttctggaacttcatctgcgctgaacgaaattttttgcttttgcatgtccttcaaagatggtatttctgccaggttgaaaatttcccttcattcatcatgtcttgcatatactcgacttaagatattatcatgaaaatattctatatttttgaatgaatgtatgatcgagttacagaatagattcttttccttcgctcccacctcaataacaaagttgttcctatccattttgtttccatatttatttccttgagatggtggtggtggtaaatttcctgtttgatttagtagtaagtggtccaacttctcctgctcgatcattcgcaatataatcttcctcacatttctgcagttgcttgttgtatgaccatggaatctgtgatagacacaaaattctttactccacctccctggtggtggatcttcgcctgcattatgtggttctggaatatcatccattaggagagcagcttcccatactttatccactgtagtgtttaattttggcagattgacttgttcccacactattcttccagctttcttgttataatttgtttgctgtcctgcagagctacctagctgaactgtatcattacttccatatttttgaagttgtttgtctctgtactctttttcaaactctgcttgatctgcacttcccatagccactaaattttgttttatttctgcattactccttgattcctctgcgatatactcgcaacagcatttgtgagtctcggaagtaagcttgtattttcacctttcgaatctgatattgcaactgggtaagattccatgtctctttgcttttgctcgaggactatatattcttcttgaaattcgcgtagttccgacattgtaattgtatattttactctgaaaatttgggtgtacaataggtctgttgcgaagagagcattaatgaatacaagcataagatatctctcgtccacccaccttcccatttcactacacattgttctccagcgagtcgttagatggcgtaatctttcattttttcttctgcgaagtccaaatgcagtttcaatccccggtctggaaagattattacttatgtacttccccaaaaatatgttttgtaaatgatgaaacgaaccaatggactctacaggtagtccttcaaaccacttcaaatattcacctgctaaaattgcagcaaaatacttggacattactgcatcataattttcccactgcaataaacatctagaataagctttcacatgttggatcgcacaagcactaccatcaaatatacttgtaaatgctggtaaactgcacttagatggtatcggtgctctttgaatttcttttgtaaatggagtttttccagcttcctccactgcttcctccagttgtcttctcccataatttctttttgcaatcatcatttctcttacttctgccatctccctgagaatttctttgctgaattattgatccaaatcttcttgcataggtctttttagccttcattgtctcaatttattctcatgattgttttggtgtattgcctcttgtatctcttgtttcccagcttcgtctcttcttcgcctacgcctttcagtatttgcttcaatttgtactctatcatatctttcttcattacatgtgcgatcatatcaatatcttgatatttctctttcttgttgtgtcactcgaccttgatccgtatcttctaggcgatgacgttcgtgtcctcttattctactatcaatgtgacgcaatccactttataattctctttcttctaactattcccttcttcgctgtctatatcttgcactcgcaacttctcgttcgctctcatattcacctctcaatgtttccctaccatgtaatatcatttgtccttgccctggacgttcttcttccctttcagaattagtatttgctcggcgaagaagttctcgtcgatgctcataacgattagttgctaagtcaattatacatcttctttccctgtgatcttccaaattttcatcttattgcgagttttcttcaatgacttccatatgttgctttcgcctatcgtttcttcgattagattggctctgtctggaagacttcctgttggatcttgatcttgagcgtgtaacactccttgacctttgttcttgtaatctaagattctcttctcgtaaatcatcattttgacggatcaaattcgcacgctcctctttttctctctttctttcaattattagttttttcctaagctctgcaatcgtcatatttccttcactcgctgtaattggttcttcgttcccaattctctgatcttattccgtagaatttttcatcgcattatggacactcactctatcataatctatatcagtattttgtccttgtcctcgctgaaatctaattggattttcttctctttaattttcgtccactctttattcttcttgctcaaaatttgtaattcttcttcgttcagtgagtctgttacttcttctagtcgtcattccttgttccgcaacagattcaatccttaccatttgctaaatgttttgatctcactattttatttacaatctatgatatagtatcaggatttatcatccagagctgttcctagcgccaaaaatgtagttgtaagatttcttacaactacactccacttaatatgattatatctctatgtgatcatcatggacaattattttattgattgaatattcaaatcacttacaaaatagatggaaacctaacaacaactcttcttgaaacctaaactcaccttctctcttccaatctctcttacaagacttgtcctagaatcctcagaaacaatgactctatcctttatataggattttacatagtggatgacagctaagaatccctttattttcgggatcactatgcgacatattcgctcatatacaatctctcatcttcgcataacttacttcttcgcataattcctcacactttacccatgactttgctgacatcatctggtgtgtcatcttaatttgttgtgtgcgatgctcctcgcgtatgttgtattcttcacttcgcgtagttattagcgtgtgcgatatttaactcctacagtattgactgtcgacgtactacctaattaaagagaggaactgctggtcaataaccacagcttttttgtttagaaagacatatataaattggctcccctcataaggaagccaacaagttgaaaggacaatcagaatggctttgtagacgtggatgtagccgttgtacgtaccttcgtaggctaagcattaggtagacggtagaccttgtagccaagtaaaccagggatagctagctaggtttgtcttgaggagagatcatgtgatggccctgacggggtataaagcccaagcgcatccataagggtttctataaatggtcttccagaatgcgccttgtagtagccaagccaaaattcaagatccaacaaacaaacaaaaaaatgtggagggaaagaacgagtaaaagactaaattatgagaaccagttttccctgcaataagaaacaccaacaaaaagtaggtaagcaaacgcaagagctaaaacaagacaccacgacaaaagagaagaaaaattctctagacaaaaaccagcaaacccaagcggtctacatgcaaacacccctgttggaagggactatagtctatatacatgaggtctaggacttgtatatatgtgtctaactggatggccaaggaatcttccggacatttgttggaaggagctatacaaatgatggatgagtattaccttttgaaaaggaaggatggatttaagtgagttgatttgaaaatttgtccacccttgttggccttctcctattatgaatttccgtaaatcctaatttatttatttttgattttgaccttgtatggcatggatgatgaagtcgtgttgcagtatctaacaaagacgtttcttcctaatccgaagagtttttattttcaacatccaaagttaagaatcaagtttgagagcatcaatattggacattggtatatggacgtttcgttcttcttattaatggatacttcatgaaacatgtaagtaatatattgcaatttcattctcaataagattccaaaaataatattctgtaggagttctggcatttgtttattgctgaaaagtaaaaatattgatatgaatcagtgatgtagtgcaagatatggcagaatcctatttggaaggaagggatcgacgaaagaatatccgttagccatgtatgaatattttcgtatttgttattttgttaggaaataagagatatcttgcaagtatgggcatgatattatatttagtaggattttctctttattagcattaatcataagagatattgacatattccataaggcctatatatggccacgtctgtaaggaagaaagggcagattttgaataaaagaaaactcttcctttgagaagttttatacattgtgtgatttctagtactaacattctacaccatttggtattcagaaactgggtatcgatccttccaacatggttcatggtagaggtcagggtggtcctcgcaaagctatggttgatgaggtgatggagagaacgagatacgatgaactatcacgcacggttgagcagctcgccggtcaggtagcaaccctgttacaacgacatgagcgccgtcatcctcctactgatgagtcctattcatctgatgaagatgacgatattgatattgataaccctgttgttgggcgtgagcgtgaatctaggagttgggaatcatcattccgcatcgaaattcctgagtttcatggtagcgggttgacaccagaggattgtatcgactgattttctactgtggaggaagttctggaatttaagagggttcctgatgatcgagtggttccgcttgtggctacacgatttcggggtagggctgctgtttggtggcgtcaactgaaagcttcccggattcaaaaaggtaaaactcctatttcttcctgggcaaggcttgaaaagtgtatgcgttcagccttttttccatttaactataccagagaactgtatattcgtttacaaaatctttgtcagggttttcgatccattgacgaatacacgaaagagttctatgatttggtcactcggtcaggtattacagacaccgatgatcagcttgtctcccgctatataggtggtctgcgtgagactttccatgacacactaaatatgtttgattatttttctgtgtctgaggttcaccaacgagctctgcgtttgaaaaaggaattatcccgtaagtcaattagagcagccgttggccgtcctactattgctccttcacatgttgcttccgctcaacataatgttagtacgtctcagaggcctggtcctaaatgctaccgatgtggtgagcctggtcacttggcaaacgattgtcgtaaggctggtcgacccggcaaagctttactcgtagagactactgctgctgatgatgtctttgctgatgcggaggagacatcaactgagttcgatgaagtatttcttccaggggaccaaggtgactgcttgatgatttctcgaccatcattcctgacgccgaaggttgacgctgacgagtcatggctcagaaagatcattgactcaggcagctgtgagaacgtggtgtctgaataagctgtgagaaatctcaagttatcaatagagaaacatcctagtctgtactctcttcactggatgagtaaaggttcggaggtaactatttccaaacgttgtcttttgaagttttccattggttatgtatacgaagatgctttgtggtgtgatgtcgtggttatggatgcttgtcatctgctattgggacgaccttggcaatacgacagggaggtaattcacgatggtaaactaaacacatattcattcttgttcaaatcgactcgcatcacgttagtccctgccaaggagactgtgcacaaaccactctctaatctggcttccaattttcagtcttggcgtacgtttgagaccgagatgatagatgagggtattgtgttcatcttgtgtggtctttctcctgcatctgcgacggctgtggaggttccgtcatgtatccagggagtattatcggactttgcagacatttttcatgttgaccttccggaggggttgcctccatctcgatctattcagcaccggatagacttagtgccaggatctgttcttcctaatcgagctcattaccgtatgagcccaagagaacacgaggaactacaacgtcaggtacgggagttattagccaagggtctcatcagagagagtcttagtccgtgtgcagttccggggttgctcattcctaagaaggacggttcatggcgcatgtgtgtggacagtcgtgatattaataagattacggtgaagtatcgttttcccatccctcgtctggatgatatcctgtaccagcttcatggtgctacgatttttagcaaattggatttgcgtagtggcttccatcagattcgtatacggcctggagatgagtggaagaccgcttttaaaactagggaaggactttataaatggttggtgattccgtttggtctctccaatgctccaagtacgtttatgcgtgtcatgaatgaagtattaaaaccatttttgggtaagtttgtggtcgtttatttcgatgacattttggtttatagtactaacttggatatgcacttgcgtcatcttcgtgaggtcttagtagtcttacgccagcaaaatttctttgccgctacaaagaagtgttcttcggtacagaccgcattttgtttcttggatacgtcatatccaaggatggtatttccgtggatgaatcgaaggttgatgatgtgcgtacttggccttgtccgcaaacaatccatgaggccaggagttttcatgggttcgcgtccttttatagaaggtttattccccactttagcactattgcagcagcaatcaccgactgcatgaagaatggcaagtttgtttggacagacgcagctacagcaagcttcatcttgctgaaggagaagctttgttctgcccctatattgtctttaccaaatttttctttaccatttgaggttcatacagacgcctctaaggttggtataggggcagtcctcagccaaaccagtaaaccgatctcattttttagtgagaaattaaacggagctaagcaaaattacagcacgtatgaactagagttttatgccatcatccaaaccctaaagcactggcgtcattatttgattcattctgaatttgttttttttattgaccatgatgctctcaagcacataggcaatcaagacaagatgaatgcacgacaagttaaatgggctaattatctacatgatttcacatttgtcctcaaacacaaggctggcactcagaaccgtgtggatgatggtattagtcgtcgacgaagtctgctaacgtcactacggacggaggtcttaggtttagagtcgtttgctgatttgtacaagactgacccctattttggctcaattctggacgctgtgcatgctggcaacagtgcccagttcacgctgttggatggttttctcttcaagggaactcgactttgcattcctgactgttgctggtgtttacgtatcgttcaagaactgcataacgagggtcactttggtgacaagaccttccagttggtttcagcatcatacttttggccgcgcatgtttaaagaggtacaacgtttcgtttctcgttgtcatatctgtcaggcatctaaaggttcttcgacaaatgctggtctttatattccattaccaattcagtataagccttggaccgatattagtatggactttgttgtgggttttcctcgcactcaatatggaatgtattctgtttttgtcgtagttgacagattttccaaaatggcgcactttatagcttgcaaaaaaactacgtatgcggttcatgtggcatttttgtttttccaacacgtgtatcgtcttcatggtctcccagaatccattgtatcggaccgtgattctaaatttcttagtcatttctggaggtgtctttgaaaattattgcgtacggagttgaaattcagcagtgcttatcaccctcaaacggatgggcagacagaggttgttaaccgatctcttaggaatatacttcgcagcctggtgggttctcacactaaacaatgggacaggcatttgtttcaagcataatttgccttcaacagagccattcataagagcaccgggtttagcgctttccaagtggtctgtggatttaatcagcgttcaccccttgatcttgcgcctgtgccatatttacaacgagtgcatgccactgctgatgagttggtgcatcacttacagcagatacatgccgatgctgctcaaaacttggtggcgtcctctacgaagtacaaaacggccgccgataagcatcgccgtcacgttgaatttgaggtaggtgatttcgtttgggctgtacttattaaggaacgtttctctacgggtacatacaacaaattgggtcctcgcaagattggtccttttgaaattattgagaagatcaatcctaatgcttaccgtctgcgacttcccaatcatactcatactgctgatgtgttcaatgtacgtcatctcattccctaccacgacggcttgtctgatgatgatttttctaacctgcctaattcgagggagaatttcctctttcccggggagaatgatgtagtgcaagatatggcagaatcctacttggaaggaagggatcgacgaaacaatatccgttagccatgtatgaatattttcctatttgttattttgttaggaaataagagatatctttcaagtatgggcatgatattatatttagtagtatttcctctttattagcattaatcataagagatattgacatattccataaggcctatatatggccacgtctgtaaggaacaaagggaagattttgaataaaagaaaactcttcctttgagaagttttatacattgtgtgatttctagtactaacattctacaccaatcagcgacagttctgccgcatggaaagggaatgcgcttgtttttttatttcaggtcacactctctaaattaagtaagcccattctcttatatctctcactgcatatgcatgttccaccaaattgtcaccaacttaattttttaggtaaggagttattaggttgatggcagtttggtgaaaaatgtaatggaagactggatggtgatactatatacttcacaaaaaagatacaatcaaagctaaaattttagcaggggtacttaaggattgctaaactaatctgtggtttgaatgtgcaatgaaatgaactctttgttccttaattagtttggaatttgttaacacaatgtgactcaacacgacagtttttgtatatttcgcaatctttgtattttaggaaattgtgtttagttaggaaagctagtatcttaagcttcacgtctgttatgcatatatatgtatcgagtctctttgtataatcagtcaagaaaactcaataaacagttttgttctagttcgtcttcttgtctctcttctcttcaagttaaacctaagtagttaaacctaaaacccaacagttctagcttggtatcagctagagttaggtcctccaaattcatgtctaccgaaccttcaattgtttcttctaccagtggtgttctaatgtcttcaacttcctcttcacagtcttcagttatggcctccgttcaattctctcaacctcaccatatcattacagttaaacttaatgaaaacaactattccttttggcgtgctcaatttttggtatatcttcagggttacgaacttgatggacacgttactggtacaaaaccctgcccagcttctcctgttgatggtgctgctccctcatcggcttttctttcttggacaaaacaagacaaaatcctagtaagttggttattctcatctcttacacctgctgttattcgtcacgtcgtcttacaacttccaaagcaatctgggactctcttgaagctcaatatgcatctaaatctgatgctcaaattcaccatcttcattgtgagctacgttctcttaagaaaggatcaaaaaccatgagagagtatatcaattatgctctatatttggtggatagtctcgctgcttccaataccacagtcaccgacaaggaattacgacattgccttctcgctggcctggacagttcatatgatgccattgtcacatctttaaccaccacaatgggttctcttactgcagaagacttccttacgtttctccttactttcgaattgcgagttgaacatcaggctaaggcattgaattggcatcttgttgccaacgttgctgctgctgcacagttccgctcctctactgcaagcacgtctcgcttctctgcaccaaccaatccatctgcaactggctcatcttcgtatgctgctgcacctggtatgtatcgtttcccttctaatcgttctcaacaacgagttgttgcacttagtacatcttcgtatgttgcgggtcgttcaaaactaccatgtccactttgtggtcatgaaaaccatgaagcctcggactgttggaaccgcttcaatcacagctttcgtcctcctcgacgtcaacaactggcttccgcacctcgtgcttatagtgctcaaactggtttatttccaactccttcttggactcctgacagtggtgctacggatcatataacaaatgatctttctcgtcttgaattttcaacctagtatagtggtcctgatcaaattcagatggataatggctcttctattccaatttctaatgttggttcttctgttttgggaactcccaatcgtaatttgcaacttcgtaatgttctctatacaactcaaatatctcataatatcttgtgagtgtctcgttttactactgagaataatgtcttatttgaatttcatccaaatttttgtcttgtgaaggatcgatgtacccggaaggttcttcttcgcggcagtaggaggggtggtctctatcaatttgatgctccgtttaaatctcctaaagcttgcataggagaacgtgctaagttacaagattggcactctagattgggacacccaatgatgcgtacagttcgtaaagtcgtcttccagtttacacttccggtttctagtcaaactattaagttttgttcatcttgtcatgaacataggagtcataagttacctttcaatcctagtaaaactatttatttgaatccattagatttaattgtctctgatgtatggggaccttcttatgttttatctaatgaaggatacatatattatatcatatttattgatacgtttagtcgttttacttggatgtttcctatgtctcaaaaatctgatgtcttttctatattctttttgtttcaaaaccatgttgaaaatctttttaatcggaaaattaagatttttcaatctgataatgcacttgagtatcgtaaacttactccgtatcttcagcaacttagtatttttcatatattttcatgtccacatacttctgaacaaaatggtttagtcgaacgtcgtcatcgtcatattcgtgaaactggtcttacgattctaaacatggattctgtaccatcctcatattggtatgattctttttatacttcttgttatttaatgaaccgtgttccttccacttctatccattgttcttcttcgtatgaaactctttttggtgtcccaccagattacactcttattcatgtgtttggttgtttgtgttatccgcacctgccaccatataggtctcacaaaatggaacctctttcttatctttgtgtttttattggatatagtccatctcaaaaaggttacagatgtcttcacattcctacaggacgaatatatgttagtcgtcatgctgtttttgatgagaccactttcccctttgcgtctgcatcatcgccttctccagcatcgacctcttcacaggtaccagtttctccttccctgaatttatctttaccactggtattacctactcgtctcaatgattggacagaacatccaatttctattttgtctctcgataatgatactaccagaatagtcagctctgtcagaccttcctcgtgtgagcaaccgacagcacctgcaccttatttgtgtgagcaaccgacaatacctgcttctgctaatgaaatactacagtcgacagcacctgcctctgccagtgaactactacaactgccagcatctgtacctgcttctatcattagtcagctacagccgacaacacctgcgtctgcttctgatcagctacagtttccaacgtctatctccacatatacttaagtcccaaccacgtctcttccagtatatgcgacagcaccagtacccactacagagtctacttcagctcccactgtggacttcccagaacctgcgacagcacctgctctcactacacacccaatagtgactagggctagagatggcatttttaaaccaaattcaaaatatgctctggtatgtgattcaattttgagcctacttttatttcccaggctcataaagatccacaatggcgtacatcatccaatgacgagatcaatgcattgattcgaaatggtacgtggtcattagttccatatgatccttctgtgaatattattggatgtaaatgggtatttcgtatcaaacgtaatcctgatggtataattgcacgtcgcaaatctcgctttgttgcaaaaggttacaatcaaccagaaggaattgattactctgaggcgtttagtctggttgttaaaccatgtagtatacatattattcttacattggctttatcttccaattggcctattcatcaactcgatgtgcataatgctttcttgcattgggaacttcaagaaaaggtgtatatgaaacatccaccggtctatgtggattctcggtttcctacacatgttttcaagttacatcgttctctatacagactcaaacaagctcctcatgcgtggtaccacagacttagtacctttttgctacaaattggctttgttacttcgaaatgtgactcgtctttgttcatctacaatggtacttatggtactatttatttgttggtctgcgtgaatgatattatagttactggctccagtactccaggtatcacttctattctcacccgtttacaacaagaatttgcgattaaagatcttggttccttgtcttattttcttggcattgaggcaattcgtacttcttcggggttatttctttctcgacaacgttatgcttatgatctttttattcgagcgaaaatggatgtagtcaaaccaattcatactccacttagtacttctggagacatttcctctgatcgtagcactttcttgactaatgctactgaataccgtagtattgtttgcgctttggaatatttgacatttactcgaccagatcttacatatgctgtcaattgatagacacatttttgtgactaatttgtcctcaatgttgtgttttgttagtactcgatttcgtacttattatggtgttttatgtttttgtagatgtttttgaaaaaataagctcttgcggagaaatgggctcgaaaagtggtgttttacaccccatggtgaagtactaaaggcacccccgaaatgtgttaaaggcaccccagaaatgcgctgaaggaatcccagaaaattactatttttacgcccaaaaatactatttgcaccccaggacaagtgctaaaaggacgcccgtatagaattagggggaggacatcttcttcccaaaattcaaaaatgaaaaaaaaagggcgggaaaaatggcagcaacaatggcagagttttcgatcgattcttgaaggagttctgggtagactaaagggctgaaacttagtgggtagacgcgatatgtcataacaaaactggtatgggtgtttgtttcgatcgaatttggctgaaaaatccgtgagaagaaaacagggaagcacgtacacggaagaagatattcacgggattacagcgagttagacgtgtgctgctcgtgtttggaagaacctaaccactatttagagtgtgaagaagttaaatatggaaatatggaagcttcagaacgcgtgaaaatcaatatcagtgataaaaatgaaaagaaaatagcccgagtaaatgaacattatttggatttaatggaggagattcaatgtcgcaatcacgtataaatatgttcacaaggtatcataaaagggtatggagagttaggggttagaatagagcaccagagagtcgagagaattgctgcagcagcagcagaaaaacggtgaagaacgaaaaacagactggcaaagacagtcgttttccaacagtgacaaccacacttagtcgtgggtcgtatatctacagtggttgcgacacatagtgacagtcgtagaagctacaacgtcagtaacaatttattgttgtatttgtaacaattataactgttacaaaagccctgttttgtaccttttctccctgtaaacacctttttgagcaatgaaatattattttgagagtgttttcaccatgagaagctaaaccccaccaccgggacaacggaggaagcaacttttcatgattgcggtaaatgaattaattcttttattgactttttgcatagatttaattgctttatgatttctattaattacttgttattttgttagatgccgcatgcttagttttaattacttcagatgcgtcatgcttttaacttacaaataatattttacgaaatctatttttggaaaagaactagagtcacaacttcttttgtttgagctatattgtctagaagtaatgactgaaccacaacaatatgaaaagtagtgaaatcccgagtcccggtctctcttcatcctttgacaaattttgtatatatatttttccttattttctttattaagtcttaaaacaaattctcaacaaatctgagtaaacgaatcatcttactacaactcaattgaaaattacatcaatttttggcgtctccgacgcggatttgtttatagatttgtttttaggttttattttatttgttcttttttatgcgttttggtacttttgtttgctttcaaatttggagctaagctaaagaaaaagagaagtgctgaaaagaaaggcgaagcccaaaacgaaaagaaaagagaaatccaaaaggagtgaagaagaaaattttgtaaataatttttattttatttttttagaaactgtaattaagtttttttttatttttgcaaagttttatttgtggacatttttatttttggacattggacatttttatttattattttgtttaaaaccctacggaagggtacttttaaataaactgtttgcagagaaggacggcgattacgatatcgcctcggcccctcaggttcgtacatgacataggagtcatggcccgagtcgacttcaacggttcatcccccgtctggaacgggaggtaagaattctaaacacccgtgaatcccctgtcagcgggtttactggatgattttgtatgcctatatgttgaggacctgaaatcggatttaattttctagtaaagggaaaggcctggccaaatcaagataaggactcagatttcatcattgtttccttctttcccgccttaggaacacgtaacctacgcggacctaagccttaaaatttggactagaacgagaccgatagggtaacgagcttaataggaaagtcattctagaaatattggttactattttaagcatacttcgaagttcatgatggtttctgtgagttgaatgcgtgactgcgccgccttgtaatgtgatagacacatttttgtgactaatttgtcctcaatgttctgtattgttagtactcgatttcgtatttattatggtgttttatgtttttgtagatgtttttggaaaaataatctcttgcggagaaattggctcgaaaagtggtgttttacaccccatggtgaagtactaaaggcactcccaaaatgtgttaaaggcaccccagaaacgcgctaaagaaatccaagaaaaattattatttaagcacaaaaatactatttgcaccccatgacaagtgataaaggtacgcccgtacaggattagggggaggacatcttcttcccaaaattcaaaaatgaaaaaaaaaaatgggcggcaaatttggcagcaacaatggcagagttttccatcgattcttgaaggagttctgggtagactaaagggctgaaacttagtggatagacgcgatatgtcataacaaaactggtatggtgtttgtttcgatcgaatttggctgaaaaatccgtgagaagaaaacagggcagcacgtacacggaagaagatattcacgggattacagcgagttagacgtgtgcttctcgtgtttggaagaacctaaccactatttagagtgtgaagaagttaaatatggaaatatggaagcttcagaacgcttgaaaatcaatatcagtgataaaaatgaaaagaaaatagccagagtaaatgaacattatttggatttaatggaggagattcaatgtcgcaatcacgtataaatatgttcacaaggtatcataaaagggtatggagagttgggggagaaagagaacacaacagagacgaaaaattagagtttcagaaacctccattgctgctgctgcaccaagaacacgaagaacataagacccacactgagcagtcttattttgctacaaattttgcgacacagtggcaacagtcttactttgctacagttattgcgacacagctgcagcagtcatagagcaacagtatcagtgacacatactgtaggtcgttctggtttgtaacaaatataattgttacaaacccggttttaattgttgttcctccttttcatccttttaagcacctttttgagcgatgaaaaattcctttgagtgtgttttcaccatgggagataaactccaccaccgggacaacggaggaagcaacttttcatgattgtggtaaatgaattaattcttttattgactttttgcatagatttaattgctttatgatttctattaattacttgttattttgttagatgccgcatgcttagttttaattacttcagatgcgtcatgcttttaacttacaaataatattttacgaaatctatttttggcaaagaactagagtcacaacttcttttgtttgatccatattgtctagaagtaatgactgaaccacaacaatatgaaaagtagtgaaatcccgagtcctagtctctcttcatcctgtgacaaattttgtatatatatttttccttattttctttattaagtcttaaaacaaattctcaacaaatctgagtgaacgaatcatcttactacaactcactataaaatctcaccataatgcggtgaggccttgggtatcaaagctccacacagcttccctcgcctctattcaacttactttgactcggattgaggctttgattaaattgtaacgaattccctttcgaaggattagaagctggtctagaaacaatctaagtggatccattgtgattttttttttgctagataaaataggcttgttgtggtcgagtcagccttctttgtgtttgtttagaattctcttgcagttaggatgtcgaactggtattataataaccaatacaatgagtatccgactgagcagattagacattatcctttttatgaccatagtgtgaatagtgattgggaacgcgaaacctttgaaggttatggtccataccattttgagcccaattactatccacatacccacaggtcatacgaccaaaaaaatccttttatttctctagaagagtctatcaagagtttcaatgagtcagcacggaagttatttatgaaagatacttataatattcttctcccagaagagtccgtagagcggtcaactaagatatctctagaagagaccctcaagcaatttactgataatacaaataggattgtggaaaaacttgctcaggatagtcttaatttccaatgtagttttcccaataccaccctcgaaaataaggatagtttttattcacataatcaagatgacgaggttagaattggtaacactacttgttttgataaggttcgaccattttcatgttattatagtgatgattatgatgaggatagtattgatgaagaacatgaaatatgtaggcatagtgatcaggaatttgttactccggttgagctttataatgatcgtgttatttctagtacaaatccaaataattttaataattattcacctattcaaaaggatgtggatttgactagagataccaccgttttagacgatgtagttcatgatcctttagcctgcagtatgttgtataatccattatttgatgtgcctatcagtgaatcggaggaggtaagtatgattaaaaccttagttgatgagcctttatatgaaactttctctgataatcctttatatgattgtgatgatggtttagaggaaagagtttaccctgagaatactgttttagaatctagcaatttagaaacactagtcttagaagatgataaactcgtagaaatgagtgaggatgaaccagacttagaagaagcaattgaccattttcaggaatctcatgacctagaaattagggaagttgtgactagtccttctagagacacggaaaactctaagtttgggggttattatcattatccgtgtgctttaactcttagaaagtaccctcctgtaggacttgacatttgtgcctcaaccatcttacaagattatcttcatacacgttttcccgaacctaatgatgtccagaaagaagctcagttgttagaaacccgtcctctggttgatgtggttaacccaggctatgataccaagattgactttgttttcccaccaaaaaattttcttcctattgtgggaacttttgattttaagatgtgttggttattaagttttgagactaaacctaatcactttaggatattagggtcgacacattttcttaaggaataccacctctttcattgtggtcagctgtgtgagtcaaatctaactgacttagaggatccccaattattcaggttgttgttatgtgcttctaagttcttagttgagtttttccagaatctaatacctgaaccggatcttagctttgaggaaatccaaccgatgaaaacctgttatatagacccagttatagaacctgaacctgagccacaactagatgtagttgtcttaaacaagggtatgttcggtatctttttggtatgttgcagtttcctcttcttgtgggtaatactttttgatccagattacccacagttattccgactacttctatatgattctatgaggtgactaattccttccgatgtctggctgaagactttaaacttagcacttcttgggaggtaacccaatattcttgcgacaaggtatttccttatctcttttgcttcaagtggtaacagtttctccttgttcatgcttttaattttatctttagaacattgaggacaatgttagatttaagtttgggggtatgggagaaagattttagtcgcatttttgaaacttctagcgtcacatagtacccggttagctaagtttacatattgtttctcaccgaaaagatacaaattggaatgctagagataacaacctattgagacattagagaaaaagacattgagatccttgaaattcaggagagaacttgttccttttagagggtaaccgtgatggacctaaccatccatggtggaaaggcaagtaggtcaggaaatgccaaaaagacaaagcaacttcacaatgtagtcttagttactggattacgactctctctcagtagaaacttatcatcgtcaacaagcaaagcgacatcaaaatttatgaagaaagttgaagacgtttaaggtttagaagcaacaatagaaaagaataattaaaaaaaaacaaaaaaaaaaatcaaagttgaagacttagttacaaaaagttataagagcaaatgatataagttgttgaagttcatgataccaagacattacaagttgcgaagatccaagttctaaagtccttctatcatggccatttaaattttgtcttgttatttttgtgtttaaaaaaaaaatgaaaaaaatcatcgttacgttttgttcaataaggccaaagggaagtagaaatttataactcaagcaagaaatcgaagagaagagttaattgtcaaggttctatgaggttcgatagtttatcatcaacagttgaagaccaaagaagacgttgtttctactggacactatgagagagtcaaagagagatgcattttggatagtttattatcaactcatcacacgtaattagtccagttatgtagcagatgtccctctcatctttatctctctcctaatcttatccagctgtgtaaatcagcggacgcatctataatgtttatctagttgtgtagcggatatctctttatctagcagtgctgcagatgtgtctcccctttgctttagtcagctttagaggtgacttttaatttctctggcattctagttacttggagataggttgagaatatgtatgtcctcatagctctttggatacttgtgaccaattataagtcaaggttttgtgggtacacctctggtaaaccctctcgagaataactcgattttattttctagattaattttgctcgaggactagcaaataataagtttgggggtatttgatagacacatttttgtgactaatttgtcctcaatgttctgtattgttagtactccatgtcgtacttattatggtgttttatgtttttgtagatgtttttggaaaaataagctcttgcggcgaaattagctcgaaaagtagtgttttacaccccatggtgaagtactaaaggcacccccgaaatgtattaaaggcaccccagaaatgcgctgaaggaatcccagaaaaattattatttacgcctaaaaatactatttgcacctcatgaaagtgctaaagggacacccgtacaggattagggggaggacatcttcttcccaaaatgaaaaaatgaaaaaaaaatggcggaaaaatggcagcaacaatggcagagttttcgatcgattcttgaaggagttctgggtagactaaagggctgaaacttagtgggtagacgtgatatgtcataacaaaactggtatgggtgtttgtttcaatcgaacttggctgaaaaatccgtgagaagaaaacagggcagcacgtacacggaagacgatattcacgagattacagcgagtcagacgtctgctgcttgtgtttggaagaacctaaccactatttggagtgtgaagaagttaaatatggcaatatggaagcttcagaacgcgtgaaaaaatgaaaagaaaataacccgagtaaatgaagattatttggagttaatggaagagattcaacgtcgcaatcacgtataaatatgttcacaaggtatcatagaaggggatggagagttaggggttagaatagagcaccagagagtcgagagaatctctgcatcagtagcagaaaaacagtgaagaacgaagaacagactggcaaagacagtcgttttccaacagtgacaacgacacttagtcgtgggtcgtatatctacagtggttgcgacacatagtgacagtcgtagaagctaacatcgtcagtagcagtttattgttgtatctgtaacaattataactgttacaaaagccctgttttataccttttctccttgtaaaaacctttttgagcaatgaaatattattttgagagtgttttcaccatgagaagctaaaccccaccaccgggacaacggaggaagcaacttttcatgattgtggtaaatgaattaattcttttattgtctttttgcatatatttaattgctttatgatttctattttaattacttgttattttgttagatgccgcatgtttagttttaattacttcagattcgtcatgcttttaacttacaactaatattttacgaaatctatttttggcaaagaactagagtcacaacttcttttgtttgagctgcattttctagaagtaatgactgaaccacaacaatatgaaaagtagtgaaatcccaagtcccggtctctcttcatcctgtgacaaattttttatatatatttttccttattttctatattaagtcttaaaacaaattctcaacaaatctgagtgaacgaatcatcttactacaactcaattcaaaattacatcatcaataaagtttgtcagtttttgcatgcccctactgagtttcactggactctagttaagcgcatacttcgttatctcaagaatacttctaccttttgtatacttcttcggccatcaccttatctacaactatccttcagtgtttatactgattctgattgcgctggttctcttggtgatcgccgttctactagtggatattgtgtttatttgggtggaaatattgtctcctagagtgctcgtaaacagaaaacggtatctcgttctagtactgaagctgaatatcggggacttgccattacaactgcagaaattatgtggatccagtcactcatttcagaacttctcatatctaattgttctcctcctattttatggtgtgacaatcttggtgaaacttatcttactgttaatccgatatttcatgcacgaacgaagcacattgaaatagactatcactttgttcgtgatcaagtggcttccaaactacttgacgttcgttttatatcatctaaagatcagattgcggacatattcacaaaaccactttctaaagacaggttttctcttttacggttcaagcttacggttcaggataacccgttacgcttgcgggacgtgactcaacgcggcagtctttgtatatttggcagtctttgtattttaggaaattgtgtttagttaggaaatatagtatctcaagcttcacgtctgttgtgcatatatatgtatcgagtctctttgtataatcagtcaagaaaactcaataaacagttctgttctagttcgttttcttgtctcttttctcttcaagttaaacctaagtagttaaacctacaatccaatagttctagctgaattccttttgctcttcgtgctatttctttctctttttcctctcatgatttactcttgtactctatattacctcctctgaacattttgtgcatcgagtaaatttattcattggttaatatcctaacttcatcaaaataaaataaaagaaaagatacaatcaggagctaaattttgcatcgaagatttatcaatagtcttattttgaatgaaaaaaaaaaggattattcttcacagaccgcgtgcacaaaccacaccagaacgacttctagattttatctcacaaactttttttgtggtcctcgtggaccccgcggaagccagcagagacagggtgtgtgagagcttttttacccggtttttaccgaaaatgatttacatcccgcgggcctaatcccacgggttggcccgcaatctcacaagggagtgggatacacaccaaaacccacccctataaatccgccggatcactatgtctttgcgtttttgttccttacggggcaacccacgggattgggcccgcaggatgtctatcacttcccggtttttattgggcggtttttttctctccccaagctacaatcaggtaaaatatttttcaattcaattattcttaatttgcactgttctatgtcagcccctatgttaattaacggttatcatcatttcagatctctatttcaggagatgatgttttgagacattggcaaaaactaaaatttactggaccctatgtgatcaatagtgccaacttgtgatagaaattgaaggatcaagaactagaaactgtttatcattagattgttctggtgaagctactgttttaattaatgttgataactattatattaggcatagatttcacattcctagatttggtgatacaattgtacgcgtgcgcaaaggttagagatgagcatccgttgattcacttggagctcttccgaagttaatatcacgaggggccaattgggctacgaaggcctatttttttcttttctttttcctttcttgttaatattgttaggcctaaaatgatatactacacaataaagaaaactccttgaggattcaacagcttaatgctagattttttttttttttttttttttttaataaagaagagattttattaagaagaagaaggctgtcaatgtcattgctcttaaatgttaaaaattgaaactgagatgaagataaatgaagcttagtcgagaagtaataaatgttgatgtgttgatcgatattcacctaaaaatatgtattggaaaacataaagccttattttaaaaagccataattaatacattagcaggtacaaaatgacatggatatatgctattgtatatgacacaatctgtatgcattgtgcggtcaatttcatcgtaaagtcccaaaactcaaaagcactatatatcatcgtcatcaccatagcatattctacctcgtattgaggatctatatctgtgtggctaggtgtcgtttacagaaatctgttgagaaaacatttaaacataattatttatttgctttccaaaataaacaagctaatgcaactgcttgccagcagaagatcaagtattgtctcttcaagtggtgtcttgtttttgagaatctaaagtcggcttcttttcaagatgtaatttccaattggccaagaatttattttgacaccatgtaatttttacttttcaaagaagttgtctgtaacttctttttctcctcttttcttcggttttttgtatctttgagggtggtacatgcctttttttaccccttcctttcttgatcaatacatcttctttaccgatcaaaaaaaaactagctcactcctataaggggtagatatacatatgaggtctagccctctctatgttggtgggtggtcaaggatcctttcggacacttattggaagtggctaaatgaaaggtgggttaatatgattgatgttgattttatgagttgcacactcttggccttttcctactatgaatttccttgtgaatccaaatttttttgtttggactaatatgggatggttgatgaagccgtgtcgcagtatctaacaaggacgtctcttcctaaatccaaagagtcattattctcaagttgaagtatcaatggacaataatataaggacgtttggtttagtggttcttctaagtcatggatgcttcatgaaacatgtatgtattacttattggcttattgcaatctcagaaagattatcctggtactctttggaaaaacacttttgtctcaagaaggtaattgtagtttggcatttctttactgctgaagaagttgatgtgatctcggacaattcacactctgtagaataagccaacccaataagttgttgcccatggctaagaaatggacttgtttaaatacacagaaatatagaatagtacaaaagtagctcttggtcggaatagtttattttcgaacatggttcaaggataactagttggttgtagtatgcataaatgttagcacatattaaacacgaatactagttggttgtagtgtgcataaatgttagcacatattaaacacgaatacgatccaaacatgattttctatcaagttggttgctctgttgaagctcgacatattccctatatttcatccctcgatataacggagtatagttctcggaatcgactaaatctggggccggagttactacagcgtctaaagatggcccgtttgcagtaaccacagttacccttgtagccttagtgttcaccgcaactcgatgtaaaatgctcttatatttcccattgcttaatatctataaaatcaacaaaatatgcagttaatgaaaaaatcacacaaatggggcattaagtgagaaaatgtgcgtacctccatgtgatcaccaatgttaaccataaaagagtttggtaaagcatttgcaacgatccatttccctttgtgtttgatttgcaatccaccgatttcgttttgagcaagaagtgtgagaagtccatgatcagaatgtggaggcatacccatagcaagttctggctgtgggcaaggaggataaagatttacaatcaggatttgtaaaccagatttggtttctaatgccttctcaatataatctccttgaagccctaaactctctgatatagcattaaccaattccttagctacttctcttgttcttttacaatattcataggagatatttctgcataaacaaattgaatttccaacatgtcatcacatttgttttggtgtgaaatctagtactacgttaaagagctaagaataatgtgtatacgcaaatttggaacgaggtagcttttttcgggttaattattgatgcgaagaatattggggattagacatgtaccttcttatcttgttttttgtttatctttttatattttgaacagtttgctagcgctttaaatcgtgtgatcagaattaaagatcagatcattatacttatcaattgtggggaagatgactattatttctatagtttgattttttttttttttgcgcattttctaataatattgatgatatacgaccaaaaattttacacacacgataacgagaccagttaataattgcgtaaacaatcaaataaaaatctcagataagcggattttgaaaaagtgtgcacaaaacttaactatttaagaattccatgcatggagtctaaactctgcaatatatacatgactgaggttctaatttcattgtaccagctcggattggccaaatattttatcaggcgcgaatctctgtatgacggaatttatgatagtgtaacgttagaacttcaacaacataaacatacaaatccatatatttctaaagccgtaccacaatttctttgttttttgttttcctatctgcatgtataaaatatcagccgtttacgttaaaaatagggtaattgtttacctgaaagcatttggtttgagcggggcatggaaatctggatgtacaagaaccttgagataatctctccaaaagtaaacattctcaactgaagtattaaaactggttccacatctgatcggattcaaaacatcttttccaacatagtccgatttttcatctggacttaaatcaaagaaactcagacataaattcatcatttcatttattagactctcagccacaccatgattaatcacctgtacagcacaaaattaacttattatgttataaaaatgagtgtcaattaattgtgagctaaatttacgtgttcaatatttgattaccatgaagaaaccccaatcgagacatgcaatacggaggttttcgatgatttgtgaccgttgatctggagaaccggatgtgaggaggtgataatcaattatgggaatctgttgctcggcttcttcgacttcctcaggatttgtggggaatacatactccgacggaactgttttaaggtcatttgattcagtcaagtccttgacagttctacccataaatctagtatggaaacaaacctcaagaccagtgaactaattaagtgagaaagaaaaaaaagagagagattgagttgtggatgttcaaaatagatacttaagaaattaaatttataggcgtacgagtcagtagatgcttctaataatgtagatcatggtttctggaaaaactatacttgataagatgccactaaagccctccttaattatcaatgatgtgtatgtcctagttgagtgagtgacatctctcaataaaccagccaaatgactcaagcttttgtcgggccttaatcaagagccaccactaggtccactactatgaattattgatatccacaattattgataaaccttaagataaactgaattgataattataccttaagataaactgaactatgagagaaagagagaatgagttgtggatgtccaaaacagatacgtaagaagttaaatatagatttatgcatgagccaataggtgctgtatagtcgtcaaaataacagtttttttttttttttgctcggtaaaactaattttatagataaagtagtattacaaatttcattttaatgtaaaatgccccataggaatgttttccacaaaaaattgtagaaaaccctattacagtaaaactagaaagcccaaagaacaaacattatcaccactgatatacaaaagcccaaaatacactcaagcccaacgagctaatatcattttcaaaccctaaaaataggaaccctagaaagataacagaaaggcccttgcaaggtaacagatatggtaacagtacctgttgataaggtaacagaaaggcccttgcaagtggcaatgctgttgtcatgtggatgtcgttgtaaactaagtggcatctcaagtgcgtgaaaaatactaggacataagttaattttttactatagaatgcgcatcaaatatctactacaaattaatacttgtgatatcaatacctaacgtggtaggatcccctcacacttttattatcacactatctcacgcgttgggcgtcatttttccgaataaaaactaaaccgtaatggatttgaagctaatatttttgggatatgttcatcttaccaagttctacatacctactaaaaatgagcacattccgaaatataaaacctcataatcaaccggtcttaatttcgacggccagaaatccgttgattttcaacggctcattttcaaagtagtagatggtggtgttatatgactcggaatacactcatttttgataggcatgtagaatttggtaagagtaacatatccccaaaatattagattcaaatccattacggtttggtaactttggttcttattagcaaaaatgatgcccaacgtgtgagataatgtgataataaaagtgtgagggaatccctcctcatacctaacggctttcgattgtgtccatatatccaacaacataatactaggcagtgactaaatacaatctactcttaagttaattacaaccctctctaaatattgtgtacctaattaatgtgggtaattaaaacctccttgacgaatcaccatcaaaactgggtttaattattatcttctcctcctccatcttctaaacttaaaggttataattgtaattgatatttctaattgtaatttttgttttcttcataattttgatctgttgttgtttatgttatcataacggtgatggtttgatcatctggcctatttgataatgatgggtttttgtacatctttgatggagcggatgtggtggcagagtcgtttttggtggtagtttttgtaacttaacttagtgttgatcgtaaaggcaagaccatgagcataggttttaattacccacattagttaggtccacaatatttagagaaggttatatttaaccttgatgtgggttgtatttagtcagtgcctaatattatgataggcgcaatatattttataggagcagaaagaaattataaggaagaaataaaagatatcagataagagtataagaggaaaagatcaataactcacgtacaagagaagaacacagatatgaaaaacatattcatatactccctctgtcccactattaaatgacctagtttaagtttacacaatttttaaggcaagcaaggaaaagagtactcttaagcattttttacaattatacttttatggataataactagtcaaatttagaaatgatttatctctcaaactgctccacggatgttcgcaaacttcatacaattgaaaagcattttaaaacatctatgtaacgaatataaacatgcctatcaaatcatgcatatttcttatatttttttataattaattaaaaggataattttagaaatatctcattgtttagtgatatagatcacttattagtgggacaaaatctaaaatcaaataggtcacataataatgggacggacggagtattagtcatggttaagtttagataacagcagtcacacattacgtacaaagcacgcatttattttttgctcgattgacaaagcacaagtcaaacgaagcaaaccacacaacataattataagagatgttttgtaaaagggtcgtatgtttactgcctaattagggtctgggtcgtaaaagatgcagttgatgtgtttgggtcggagaccgactttgactgtttaatttttaccaaaatacccatatgaaatggctaaaagacactatagctaaccggtttcaatacttcactatgcacttttcacaaacacttgatgtgggagagaccgtctatggagaggtgaatttgctttgtttttttttcccaaatttatagctccttctctgcacctatatcatttttgcaaacaacccaagttttcttatcaatcatacgctctaagactcacctattcataacaaatcatcatcacctaaaacacacatcttggctataatcttgggtccgtaacttacctaacactagcacaaactcttcctatatgtattacaactagtacccatttctcgtgaatatctcctttaaccatgacgattagccataaaaagaaccaaccacacgtcccatcagatccattgcttgtcccgcgaacaacttggttcaatgaacaacaccaacaggtgatgtggttttagctctttctatagctacccaacaagtgatttgttttgttatgaactgaatttcttgattaaagcatatatgtattatgctagaagttaatcgagatgattatgacaggttttgaaattactgttattgttttgtttaattataaaagccatgccaatcataattgacttcgcaaaccacacaggtaacagcaatgctccaccatctacaagtgatggttttttccaagagcatgcaattgccttgctgatactagtactccttaagttacgtaagtttcagttgagggtccatttgtcataaccaaagatattcttgcttccttgttgttctctcttattatacatcccgttgctccgtatctacaaatcaaaaacatgttgggaaaattggtatcccgaacgcagcgaaatcacatgatcacaaagggtaattggtaatttgaaccaaaatatgggagaaataataagagagagacataagataaacaaacacacaaccacaacataagatatacgtggttcacctttacaggctacatccacggccaacaccaccagaaaaactttcattaatcaaataccattacatgctctttctgcaacccaagacaagacccaaagagttaacaagacatacccgagaacaccgtcgaagaagccatagaaaccaattctctaaccattcctcaaaccagcctcgtgtcttctgttctacaccgtcttcaccgttgctagtaacaagggagaaacatggaaacactagaaactaggtttcgggcaaagccccaaaccctaaatactagaacaccaaaatcctctctctacaagtttttctctcaaccgatattgaccttcacgatagcacacgacccttcctaacaaagagaccaaaatcctaagcacaagaatttaccactcttctaggttggattgtttacaaacctacaattctagtcctatatatatcgagaacataaacttagccctcaagaaacttagctttaggaacaagctaggtttcctaacttggctctgaagttaattcctaaactttgggaacaagttttgcacaagacaaagtttgcccaaaagtcaaactttaaccaccgactaacaattctccacttcggatcatgctttcaagcatgagacgatcaaccaaagaatcatctttatactgttgtgcaccatctctatatacccataaaattaatctgaagctcaaacccgaactttcatcttcatcgaaccatctcttcgaccaaaataccatgatgttgataaaagtcttcaaaaccatcttcttcatgaagaacacttgtgaaactgtccatgcttcacaaacaccatgaaaatcttcaatcatcgtcaacaactccttgcacatactccaccattaatcaccaagaaaaccatctagaagaatcaccattagctccacctaaccaataagctaataacatattgaactctaacccaaaaaggaagattagattcaatatcatactccagcatatgtcatgattaccgtgtgtctgaaaaaaaccatcagacatttccaccatgattaacaggcttaatcctttaagcgattctcaaagacaccaatctgacatatttttaccaccatcacacccaatatactcgcttagaatatactgtgtgaatgcccttattatcgtggtacatgcttccgagattgggaacattcttgatattacgtgcaatccatcaagaacactttaacatagacttaagaacataaatctataacatctcgtgcataacttcgaagcgttgctggacttgcttctacatgagacctcatagcaccattctttctccaaactctgtaacccattctttatagtgtatgattactgacactcctcaagaagtaaatatgtattccacctcattcagccttatttttcatcccatagtacatcataaaatcaaacgaagaacataaacttttaccaagttgaacctctgatttgcaaatcacatcacaaactcatctttgtttaaatactagttgaaacattatcttgaaaacatagttctccacccgagcaataaaccatcattcaattccaggttaaatcacacccgccggtccatggctctgataccaattgttgggaaaattggtatcccgagcgcagcgaaatcacaggatcatcaagggcaattggtaatttgaaccaaaacatgggagaaaaaataagagagagacagaagataaacaaacacaaaaccacaacacaatatatacgtggttcacctttacaggctacatccacggccaacaccaccagaaaaactttcattaatcaaagaccattacatgctctattctgcaacccaagacaagacccaaacagttaacaagacatacccgagaacaccatcgaagaaaccatagaaaccaattctctaaccattcctcaaaccagcctcgtgtcttcacttctacaccgtcttcaccgttgctagtaacaaaggagaaacatggaaacactagaaactaggtttagggaaaagccccaaaccctaaatactagaacaccaaaatcctctctctacaagtttttctctcacaccaatattgaccttcacggtagcacacgaccctccctaacaaagagactaaaatcctaaacacaagaatttaccatcttttaggttggattgtttacaaagctataattctaatcctatatatagagaacataaacttatccctcaagaaacttagctttaagaacaagctaggtttcctaacttggctctgaagttaattcctaaactttagcaacgagttttgcacaagacaaaatttgaccaaaagtcaaactttaaccaccgactaacaaaacacacaagaaaataaatcaaaaaagcctgttcccattattcagttgtaaatgtgcaatctgggcaatctataatttactcaaatgagacttcggactcaaaacagagaactagtttagacgcacggacctccatatgatcaccaatattaaccatgatagagttcggaattgcattcaccgcaacccattttcccttgttcttaataatttgcaatccaccaacgtcattctttatgagtagggttaagagactgcgatcagcatgtgggggcaaaccaattgctagttcaggctgtgggcaaggagggttgagatttgcagaaaacttttgaacaccagaatttagttcaagggactcttcgatgtttttgtcctctaattcaagtccctccattatagctctaataagttctttcattatttctcttgatcttttatgtactcccttaaaccctcgctgcgcgagtatacaaaatttatttttagccaggtgcatttacaaactcggacaaatctgattgagtataaggatttaagcaaattagagatttacctcaaaccatcgggttcaacaggggaattaaacactggatgcactaagactctaagataatccctccaaaaggagacactcttagaagcagggttaaaattggtttcgcatataattgggtccaaaatgcaagggtctgaagcattctctccgtcgtaaaccgacttttcttccggacataagtcgaagaaattcatacaggagttgatcaatccctctttcaaactctatggaattccatgattaaccacctataattgtcacacgagcaaactcttgataaacatgtgggtacataacatagactcgccatgtgtcgaacataaaaggaagaaatatgaatagaaaatctcacttaaagatctcagtcagggacttgtaaattcgaatgtcagaattatctcgacaccgatcaatctcacgaagtatcgcacataagcgaagagacttacacgaagaatctaagttacgaaagaccaagctagagtacccaacaagatatcaacgacgaaccgaaatggagaagtacggtaacttggttgaaaagatagatcgcgaagtaaatatattggggagcaagaaaatagacaggtgtcccgacaaacccatgtgaagatagcgaaagaaggagaaaaactttatggaaaatggcctgggcgaagtaaagcactcccgagaaaacttggcgaagtaaaatgagctgtactccattaggattgattggcctataaatagaggtccttgggcaaggcataagagatcagattttagagggaggggagaacttagcttagagggtgagattagggtttccttgtattgaagaacttgtatttatttccttggttagttcatcaataaagattttctagttatactacttaaacatctcttagatcttgattactttcctaccatgaagaatccccaatgcagacatgcattccgaagctcttcgactatcttagaccgctggttaggcgaaccggaagtgaggagtgagaaatcaatgacgggtagagaaacttgctccacagctacttcagctaacatagttagatcctcggcttttgcagggagtgcatgtttggaattaggaacagaaatgtgatcagttgattcaatcaagtctttgatcatactacccattttcatatcaatgttctttaactcaaagtatcactatatgttctttagctcaagatgaagaaatgttgtggttagagaaagttagagataggggtatatataggggagggggggcggggggagacagaggataccctttcttgttgaatgagtgacatctagggctgcacaaaaccgaaccataaccgaaaccgaaaccgaaaaccgaaattttttaaccgaaccgaaccataaccatattcctgtggttcattaatggttgtcagtttcagataaccgacagtatcggtttcggtttaggttttgaaataaaaccgaaccaataaccaattggttaaccgattaatagtgaccgtaggattaaatgattttaggccgttgatggggatatttaaccctaataagtaataacttacatcgctcttctcttctttcatagatatcatattatcagaaagctttcccacagacagttccacttccaacttcactcgactcgactgattttaggcagctgtgcttatgatttgtagaggaaattggttcaggaagctctttctcgtgattcttctggtgctgttcaatccaacttctctttgattactcctacttctggtgtctttcaggtttgatttctttttgaaactttgtagatctgggttttgtttcagattcctttaaattttttttactagaaatggagatttgggggttttgaatctgctattgaaattactgattaaattttttttttaatttttcgttttgtttgatttttgtacctttattcttgatttacagggatctctgcaagtagtttggttgtgaatcttgtgattgttgtcatgttcatatttatgtgattgttgtcatgtttatgattttaattatgatatcagggtttgtaaaattgaaaaaaattggggatttcaaatgtaaaattggtcatttaggttgatttacacagtgggttttgcttaaatgtatggtttaaattaaatgtatggtttatcacattgcagacttgccttttgacaatgcgaggaggatccagttcaacacatactgcctctgtttcttctaataagcggccacctcgacctccacctaatgcaagttcagatggaggtgcaaattcagctggaggtgcaagtgctgctaaagatgctagtgttgctggagatgctagtgcagatggagatgcaactgaagctgtcataaaagtgacagaaacacatagcaataagcgtaaaacccctgaagatgcaactgaagatgacacagaagtgagtcaagtgacagaaccaaagggaaagaaacgttctgatgtgtggaaccactttgatatggaccccaagccttcgaaatatgcaaaatgtcgccactgtaagacaaagattgcagctcagggtaccaagtatgggacaggtggtatgaataatcatttgaagatatgtaaaaagaagcccaaggaggaaaaaggacagcaaacgcttgattttcaaccggctaggctaggaggagaaggaaaattggttgcagcaacttttaatcaagatgcatgtacaaaggcagtgattttatttgtgattttagatgagcagccgtttagagtggttgaaggagaagggttcaaggaactttgtagggtacttgaatccagattcaagatcccttctcgtatgaccatttcgcggggtgtgttaaatttgtacgaagctgaaaaggagaagatgaagaactacttcaaggaaaacaatgtgagagtttgtctcaccactgacacatggacctcaaatgcccaaaataaaagctacatggttgtaactgcgcattttattgataaagattggaagctgcacaaactggtaatcaactttttccaaattttaggtcattcgggtgaggtaattgggaagatgttagaggaatgtttgttagattgggaacttcctggggtttttactattactcttgacaatgttagtgctaatgatttagctattgattatctaagggaggatggtcatttaaaggagcaagtgattagttcaaatggtgtactgaatactaagtttatgcaagttagatgtgctgctcatgtgcttgcacttgttgtgaatgctggcttgggagagtatcacatggctattaagagagtaagggcagtggtgaagcatgtgatgagttctcctgctaggttgagtaagtttatggattgtgctaaacaagaaaagatagattgcaaaaaaggtttagttttagatgtggatacaagatcgaattccacttacatgatgttggaagctgcttgtagatatcagaaagcttttgaaaggctagcacgggaagataaggctttcaaaaagaagttttgtttcaacgaaagatccatccctcctgtattttctacttctaccggtgctagtaatgatgttgacatggaagaagcttctactattgctcataacaaaggcaagaagaaggcccctcctccgcctcctatacatgctccatatatggaagattgggccaatgcaagatcatttggaaaatttttaaaggtattctttgatttgactgtcaagttttcttactgtactcgtgttacttcgcatgagttcttgtttaacgtaagtgtcattcatagaacaatgaacacatgggtaaaaagttcagatccatttctctctggtatgggcactaaaatgctagacaagtttaataagtattggggagaatatgagaaaatgaacactctcatgttcattgctgttttgcttgatccacgtgagaagatgaaaggtttaaattttattcttgatactttagatatcacgggtccgtcattacgtaaacacttatcgacttatgtgaaaactgattttcaagaacttttcgaagagtacaagtgtctctatgcaaatgatgaaaacatgtctggtgccgcaggtgattgtaataatgttactcaatcttctggggttactgatgatgaagattctgcatatgctagtctaatagcagagagagcaagagaagatgaggaggatgacaatgttgaggggaaaactgagttggagttatatttagaggagaaacgtgaaccaagaattagccctagcggtgttcagtttgaaattttaggttggtggaggactaatagtacaaggtatcctgtattatcacatatggcgagagatatactagccataccagtctcttctgttgcctcggaatctgcctttagtactggaaggcgagttattgattcatatcgaagttcactgctgcctaagactgttgaggcgttgatttgcacgcaaagctggttacagacaccggttgatcttgatccaaacaccttaggaactgatgatgctgaagatgtttcaggtattttctctactcacttttgtaaaattctgatttgttattttctgtactcactgtttgtcacttattgatgtaatttcttgcagaatttttaggttctcttgcaacttctaagttcatccgcattgacatagatgatgatgaagaagaagaagattcaactttgttatcgtgaagttgattataaatgatttaacgggttagcggtaagtttctctagtttgtagttttattagcagttgatatttttttagaataaaacttagatttgtttaagcatatgaatagccaagtagaaacaatgaactgtcaataatgtgagtactctcctttacgccaaaatagcttaaactcatgccattgcctttgaaggtagatcatcttagtcaactgttatgaatgttcagggcttactttacttgtaacttcttcatatcagtacaattccattgtagtttcattggttgaggtgataatgcaacattaaaattagaaatgcatattccagtaaaaggatcatcctcaattccagctaaacgaatgcttattgtttagtgcttctctaccatagcggttgataatcttgatgttattagttacattatgtaccattgcactgatcatgattgagaaattcatatttaactcgagtttgtgtatgtgcaggttaccattacaacctcctgtggaatacccaatttctacacatgcaaagtgtattcactgtaacaaactatttcctgtcgacccttttaggaatgaacttatgatgtgtagtcagttatgaacttatgattatgattttttgatgttttttcgtttttgttattaaggagaaactagactctttaaaatttaatgtttctatcaatatgtattggaagttggaacatttgatgtatttgaaacttgagtgacaggttcagaaaaatttgcctgtcatttttgtgagactgacagatataaaaaatttcagtggttaaccaaaaaccgaatggttttatacaaaaccgagttggaaccgaaccgagaaaaaccgaactacccaaatggtttcattggttttcattattggaaaccgagtagttcggtttcggtttaattttttccaaaaaccgatgaaaaccgaaccatgtgcagccctagtgacatctaataacaaaaccagcctaacaatgcaatcttcatattcgcccaccagagatttagatatgatattgttggccctaatgatagccttggtgcccaaattttgtttttcttttttaatgggcgacgaagaaaatgtatgtttaacgaattctaaattgctggcaacagtgagaaaatacgtactgtatttccttcctccatctgatcaccatgaaagatatgcgaaagatattttatttcgaaccgagcaaaaaaaaaaatattttatttcaaataaaatcttataaaaaaatggtgtccccaaggcattttctataggaatccaattctcattgataggaaataccaataggtcataggaataatatattagagagagtctactccagttgacctagtcaattgtctgtttggtcctttttggaaaaatatattatagtttggtcctagaaattatgatttggttctaggatggacaatatccacgtaggatgacgtcattgatgatgtaattgtcaaatactagtggcagaactacccttttaatggggaccatatatatactcattattagtagagaagagaataattttcagatctattttcactcacttctttttttttccagatttactttttctttttcttcttcttttttctttcttcttttttctttctgctactgtttaagattaaggatgaagatttacttttaaagatggatttgatttgattatagaaaccgatttggttatttattttatagattttgatttttcagtacagagatcttgatttgattataaatatcgaagatgaactcgtgttgaagatgacgaagacgatgatgatgatgatgatgatgatgatgatgaagatgatgatgacgaagatgatgatgatgatgaagacgtgataatgaagacgatgatgaaaaaaatcttcttcttccgttttttctaagttttgacgatgaagaggatgatgaatgatgatgatcttttgtgttcttcttctctgctactgttgttgttgttgaagaatttatttttgctgctgttgaagacgacgaagatgatgaagatgatgatgctgcagctcattccatgaatgaactctgtttttttaggtttttatatggagttcatttctggaatgaactctgtttttttaggtttttatatggagtcatttctggaatgaactctgtttttttaggttttttatatggagttcatttctggaatgaactccagtttttttaggtttttatacggagttcatttctggaatgaactctgctttatataggtgatttcttaaaaataagtagaaattaacaggagttcattttaagaatgaactgctacaaaaaaataaatagaaattaacatggaagggtacttttgtctatttaatatttttaaataattatggaccaaacagtaaagacattttcccaaagaaccaaactaacttgggaccacctaaaagaggaccaaacgatatttttctcttctcattgtgcctcgtatggaatccaccaatttctctctctcatgtgatatgtaatgggcttttaaaacatttctggcccattgtatgaattgccagttgggtcctgcgtgtccgactgtttgtaaagatttgttgataagatataatcagttgattgataaacagacaactgttgaacatatttaacctagcttaattggggccatcggaattaattgagggccatgcattagagtacaaaaaaggtcaccagaacctaatttggatcatcccttataaaaatattttttaaatggctaaaatgcccctaaataattagtgttaaaatttaattaattagtgataatcttacttaattagagtttaattttttttccagaatttttgtctgcaatttttagtctaactttctttttttcttttttgcccagatagtatgaaaaattgtcaaggtattaaaaaatttcattgacgaccctcaacagtcgttaatgtttaaactgtttaagtgacgaatctaaactgtcgaagattcattaatggcggaaatgtacgacagttttgggtcgtcataaaaatgatcaattccctgacgaccctttcgaagggtcgttactgttttagttacgcatttgacgacttaaacagtcgttaatattttagaaatgtcgttatagactgtcgttaatctccaaaaagagtcgttagtgtatgacagtttagagtcgttattgttttgatcatgatgtatatgacaaccctaaactgtcgttaatgtcggtgaaggatcgttaatgaggatcgttacttgaaaaaaaaatattaatcaaggataaaatagtatattcatcttccgatttttacacccctgaaaaatttgagggccaaacaaaattccatggcccacaattagaaaccatggcctccaattaagctaggatatttaagtggttcttttcaatgacacagcggaatccacatacacctatatacacacttttgattacaaatatctgttgtattggctggtatctgggaattattcagtgaattataagaaaaatacacacaaaacagcgaatgaagatcataccagaacagaacgaatcaacgcctacgtctgaaaggattacaaacagagaatcccgattaccagattttagaggatatcaataatttacttagagattttaggcatactgcattctgtgggacctagagatggaccattggcagttactagagtccggagataaacccttgctgccttagtgttcatcgaaagcttgatgtagtatgcgtggtcttatatttcccattgttcaatgtcatgagaatgtttattttttctttttgatctagaaagaattcggtgttggtcggtttcgaaatcaggttactgatgtaatcgtcggataactttaccgtcggataactttaccgctgtacttcatgacactcttcccacaaaatatttaaactaactcgtgaggcttagaagtgagaaaatgtattcctccatcaaatcactaatgttgaccataaaagagtttcgccggacctttaaaggaatccatttctctttacgctggatttggaaaccagcaaatatctactgcaatttgtatgtttgtggtatcaacacctaaccattttaataatggagcgggtgcgggtgcgggtattctggagaacccctcagccacgccccagtttcgtcactggttattcataagattaactcgatagaagaagaataaaccacatcaataaaatcaaagtagacggtagaataactcaagaggataaggtaatgaaagaaagaattgccaatcactttataaaatatttttaaataagccacttggcagaccacttatgggtgatctgtgatttaacaagatcgatgaagatatgaagcaattcttagggcaatcaattccggaaaccgaattttctaatgctattaaagccctgggaaaacaaaggctccaagggcagatggttttcaaggtttgttctatataaaagcttcagaggttattaaatttgattttatggaagttatttagaagttgcaagagtaaggggttttggattggaaattcaagaatacttttgtagctttgatacctaaaaagggtacagtggaacaaattttttgatttgagacccataggtttggttaatgatgtcagtgtcactgtagtatagtggtaacattatcgggtgatgataatagtgacctaaattcaaaactcgtcagcatcaaattttttaccaataaaaaaaatagtttggttcatggggcatataagactatagctaaggttttggcaaatcacttaaacacaagcttagcctaaggtcatatctcatcaacaatcaatgttcctcaagcagagacaaattctggacggggttctggtcgccaataaattaatcgactcgagaacgaaatgtgggaaaattggtctcttatgtaaattcaaaattcaaaaggtgttcgataatgtgagatgggaatttttttagagaagctatgatgcgaatgggtttcggtcaaaagtagataaagtggattatgatttgtgtacagatagttcggtttttagttcttatcaattgaggtgttgagggttacagtaaaaaggaattcgtcaagatgatcctctctctcctttttatttcttattgtccctgaaattctatccttaataatgttaaaagttaaagacgaaggtcgtattaatgatttcttaaaaatcactcaaaaaatcccacaaaatcaatagacttacatagagtctcctcaaatgtcttaccaaaaaattctctcggtatctctaaaaatctcaattgaataatccatgttaatatcaaagataatgggatctctattacgcatcttcagttcttggaagatactttatcttttttggatgcctatgaagatcagttgaaatacttgagagtgattttgataggttttgagttgttatctagtcataaaattaactttgcgagaggaaattggtatggcgtggctttgaatgatgatatgagtcactttgcttctatattggtttgccttgacgattttcttcatgcttcttatttgggattacctcttactgataagtatgaaggtacaaggaaattgatcgagtcatagataagtgcattcaacatttatcttaatggaataatatttttacggctggtaaaactattttggtcataagtacgttagctggtttacctatttaattcatgtctttatttgagattcttgtttttgtggctaagagcaagtgttatggatagtcttcaaatggagaagcattgcactgaaacagtctcccgtgtattaaaaaaaaaacttaaataagacgagagattgaaaaaagaaatggaaaatattgtcctatatccaaaaaaattaataaccacgaaattgatgctctaatggctgccaaacggatgatagaagtcctgaataagtttcatcttcttgtggttttggttgccattattggagaaatagaatttgatcttaaaaacaaagatgaaaatccgaagaatagttaaaacttacttacaccaataaattaatctctctatttctatcaaaaaaaaaacttacaccaacgaattcgagctcaatttagggtttctccggtgaaggcttggaaggatttactgccacagacacgactggattcttcttattcttcgttagtgaaggaaatgaaatcatgggtatcaaattggtaatacaactctctgattaatgtcataagaattttgcaaaagaaaactcattaaggcttagtttggtattgctgcggcttttgtaaaagcactagtctgctgtgcgttgttgcgctgtgctgtgagcaaaaagcagttagacgtttggtaaaaaattaatcaaagttaaagctgattaaaaacgctatcaaattatgtttggttaaatatcaaattcgaccattgttgttgtagcaaatgacaaaaacaggcttatctctgaaaattgttttacttaattttattagcttaaaaataattcattttttattattaaattataaatataaatactattaaatttactaatggtcactattattatgattattaaaaaaaattagtttacttaaccactttttagtatatatatatatataaaattttcaaacaaaaaatcaaagttaaattaattaatttttattttgaatagtgacaaattaaaggaattggtatataaaataatttgaaaataaaaaataataatttttaaagaataaaacacaagaaataaaaaattgattgtatataaatttaaggacaagttttgtcatttataaaataaactagagataagaataataaatcaaacattaaatttgagtgggacaagttttgtcttttaaaagcttatgcttttgtagcttttaaaagcttctcctccccagcttttaaaagttgaggattttgtcaagtgcttttgataaaaagcactttaattttcaaaagcactttaattttttttactaaacactaatttcaaaattattggcacatataaattttgataaaagcattaccaaacccaacctaaatctgtcgaacagggaactgaccgccgtctcaaaaaaaaaaaaattgctacacgtaactttttgtttgaaagggggttttgtccctcacataatgttacactaccatccactcgttcattccgagcgagttggggttggaagtggtctggaagttacccataacaacctctaattaaagcaaattgatattgcatctttcatttccaaaaagtgacactacccataagccttgctatattaagattgagaaaataattagatgttttgtgtgggataggcatcatagtaagaaaaaactccatttagtgaagacgtctcaattggctacggaaaaaaacaacgagggtctcggtactaagagtttaaggcatacgaacgatgctctatcagtgaaatggtcatggatatttgcgttaggggatgacatgtgctggaggaagattataaatgagaagtatggtggtagtcaacagccttttatttctaatcagccgaaaggttcgtatggagtctcaatacggaagggaattatggcttgagcttcaattttcaaagggaattttacctttcaaagttaataaagcgtccaagattaattagatgttaggaagattgttgaccgtttaacagaaatatggagactgaattccctaatatctgcaacaaagcttgttcaaaaggtaaatttattattgtggttagtaatgggtttattgtatcagctggttggaatctcgaaatcccaaaaaaaacatttatatattgaccgtgtttttgatcaagggctttggaaccatttcagaagcgagcctcagttttctttctcctcccttcctcgatgaagactttattacatacctgacatgccaaggataaaatggaaaaagaagttgtgggctatgataacttggtcgatttggttggaaagaaacgctagagcttgtgagagaaaaaaaatgaaacttcaaggatttatttttaagtgggaatgttataaatattctccattttggttgacctggcacaaatactcccaagggataaaaaataatttttttgagtcaatttgagaaagttgcttccactttttggaaacaacttgtgccagttgcatccaattctggaaacaacttgtgttagttgcttccacttttcagaaggtaagagtatttttaaaaattgaataaaggtatatttcaaggagtggattttgagggctatttaaataatgttcccttaccaaaatacttgcgttatgttttattgagttttagtaggcttcttttgaaagtgtcattcagaattggaaattgatgtactttcaacctccttaagtgcagctattttggtgtgcattctctatgtctttcgcgtatctcttctcatgtcttgttctatttttgtctattcttccctgtactctttttggatggtataattcttttgtacctttttcgatcaattgaaaattttactttgctgacgaaaaaaataaatacacctaactacttttaattctgtctatattcagcaacgtcacttcatttcgacggtgcaatatgttttatagtagcagaaataaatcaccgggaaataatagaataaatcaggtaagaggaaaagatgaataactcacataaaaaagaagaacacagatgcatgaaacatactccctctgtttctaaaagacagtccgctttgattttgtcaaaatattaaggaggccataatacttactttactgtccttaactatttacctattttatgttaataaaaatgcaagtattaaaaacttcctaaaattgttaagaggattgtaaataggaaacaaaaaatgaaaactaaaagatatcgaatttaaattctttataaaatttaattcctggagccaaatatattgttttttaaaaggaatgaaggacgtatttgtttccttaattatacaaatttctttaatatttaaaactaggtcgcattaatatgcgtttatgaatatataaaattaaagactataatagagagttcattgaaaatatatgcctataaatagaagttggacacaattttgaaatagacgtaaatagaatagaggacggtctttttgaaacagagggaatatatattactcatagtggacattacataatagaaaaccacagattacgcacaaagcatgaatttatttttcgcttgattgacaaagcacgcaatccaactaaccaaaccacacataattatacaggccttaatgcaaatcataattcacttcgcaaaccgcgcataattatacaggttgtaatgcaaatcataattcacttcgcaaaccacacacacgcaacagtattccacccatccacaactgatgcttttttcaagaggctacggttgccttgcttataatattctttaaattgcaaaagtttcagttgagggtccatttgtcataaccaaagatatccttgttttcttattgtttaccatagctcgatgaagcacgcctttatacttcccgttgctcagtatctacagaccaaaaaaccacaaaagacaatgaatcagtaaagcttgtgcccattagtcaataatatatgaacgatcacggaaatttaatttactcaaataagactagggttacgagaacgagacagagaactaatttacatgtacctccatatgatcaccagtgttaaccacgatagagttgggaatcgcatccacagcaacccattttgcctttttcttaatttgcaatccacccacgtcattcttgttaaacgatattgtcctgatatctagggataatatcttcttctacatggtatgtatatctttgtatattttgttccctttttcatgcatattttgtttctctttctatctctgtttcttgtatataagaacatatgtattgtattttgttcacgatgttgagtacaattctatcattcagaatatacatgtcatgacaatctctgtcatggcatcagagcctggcaagagctaacaatccatcttccgctgcaacaacaacaaacaacaacaacaacaagatcaattcctgtcatccatcccatctctgtctcgtatgtgtttagattgtaaaactcaaaccctagtatccaaaatccttccctgttatcgttcaatatgtcgcgtgaagattatcaacctattaccgtaaagtttgatggaacaaactataatcattggtccttccttatgagaagttttctcaaaggaaaagctatgtggaaatatattaatggcaaagccaaaaagcctagtgatgttacgactggtattgtcattagagataaacaagttgagcctagcaaagacaaagaaactgaagaagacagcgttgaagactgggagatcaacaatcacaagatactgacatggataagcaatacaataatcacttccataagtatgcaactcactggttttgaaactgctaaagaagcatgggattttctttcgagaagatatacccaagtcaattttgttcaacgttacaaactagaacaagatattcgatttatgaagcaacagatggatcagtcaatctcagatttccattctgagatgtcaattgtatggaatcaactagtactcatggaaccaaactggactacagatattgagttatggcagaaatacaaagaagagtcacgactagttcaacttttaatggcgttaagagatgattttgagactgtaaaagcttcaatccttcattgatcacctctccctactgtagaagctgcgttatctgatcttattactgaagaaactcgaaagcggatcaagcctgagatacctatactgtgtttgtagttccttcacgtgcaagttttaataatactttcaattctcaaagaaactatcgtgacatgtcacaggttcagtgttaagactgcaagaaaccctgtcacttggccaagaactgcactttaccatcaacacagagagtgtcacaaacatcaacctttcaatctccaacccatcaaagttagaaatctcagattcaatgtaattattgtaaagaacctggtcatacagtagaaaactgtatatctccatcttaaagaaacatgagagaaaaagaagggttaatggcactgcatacacacctgtaccatccattcttgcagcaccttcactcgaaagaagtcatgaaacatcaacatctacatcaagtaatcttgttgatattcaagagattctcaaacaagcccttgcaattggtaacaataactctacagcagcttctgctttctcagttcccacgagtaccttttcaaatggttggtttcttgactcaggtgcttctaatcacatgacattcaattctaatgtatttgaaaacaagcatcctattgttacacccaaaatccaaaatgcagatggatgtgaaatagctactagtcatattggtcaggttaaagtctcaaacaaaatacgtatatctgatgtgttacttgttccaaagatcatgaattttgtatcaattgggcaactgtgtaatcagggttttgacatttatttattctcttttggttgtgtaatacaggatcccaggacagagaatcttgttgggataggccgtagagtcggtagactatatctccctgaaactctaattgttcctcaacaatcaaagaatgaacttactgctgcagctgcaaactctctttcttctactgtgtctccatttatgtcttggaactctaagctaggccatgtgtctttttcacgtcttacatatatgatcaataaaggattactcggaacaactcaagttgataaagaaccttattgcatttcctgtaagtttggaaaacaacctgcacttccttttaataatagtattactcattcagttgaaccttttgatcttattcattctgatgtgtgggaaaaatctcccatttcctttaaggtaggggctctatattatgttatctttattgatgatttctctcgttttacatggctatatcttttcagttctagatcagatttcttgaaaatatacacaaatttctctagaatggtcaaaactcaatttaaaaaatccattaaaacctttcgtgctgatcacggaggtgaatccatatcaacttctttcaaagaatttctcaaaacagaaggtactctacttcagttattttgtactgaaactccagagcaaaatggtttagcagaaagaaaacattgtcacctcatagagacaactagaacccaacttctttcagcatcagttccctctaatttttggggtgagtcagttcttactgcaatttccacaataaatcggcattccatctatagtcataggaggaatatcaccttatgaacgtgtctatgataagaaaccaaattatttgaagattcatgtttttggttcagcatgttttgtccttctcacagaacgagaaagaaacaaactcagcaaaaagaatgttatttgtgtgttcctaggttatgttactgaacaaaaagattatcgttgttacaatccagagagtcgacgattacgtatttctcggcatgttacgttttgggaaaacatacccttttggtctcttcctagcagcaagtcttctactctagaacagtttacgtatctagatccgttagagaatgtatctctacctaggtctcagcctacaactattccattcaccaccacataagtcactcctcttgaaagtttcgaaagtccacatgaccactctatggaaaatcctgacattgcttctccagaaagggatcttgtgcctgataatgatgctttaccctccacgtactcgtcgaccaccatccaggtttgcagattaccattgttctttatcatccatcttatctatacatgaaccaaaaacatacagggaagcatctacaattccagtctggcaaacatctatgggaaaagaactaacagcatacaaggacgctggtacatgggatatggttgacttaccaccagggataactgttattggaagtagatgggtttacaagatcaaaacaaactcagaaggtaagatagaacgctacaaatctcgtttggttgctcaaggatatacccaagaatatggtataaactatgaagaaacatatgctcccgatgctcgtatgactactgtacgtacacttcttgctgttgttgttgctcgtaattggaatctgcatcaaatggatgtcaagaactcctttcttaatagagaacttcaagaagaagtgtatatgagaccaccaccaggaatgactcattctccaaatcaagtatgtaagcttcgtaaagctttgtatggacttaaacaagcaccgcgtgcttggtttgagaagttttccaatgctatcctttagtacggattcaatcaaagtgtgtatgactcagctatgtttactcgatcaactgacaagggtatggttattctctttttgtatgttgatgatatggttatcacaggtgacgatttagaaggaattactgctcttaaacttcatctcagttcatgttttgaaatgaaatacttaggtcctttaaggtattttcttggtatagaggttgacaaatcatctgatggttatttcatctcacaagtgaagtatgcctccgacatccttcagcgtgctgggttaacaaatagtaaaactgcagatacacctcttaaagctcaatccctttgaaggaaaatatttagacaatcctacattatatcgtcagcttgtaggaattcttaattatctaaccatcacaagacaagatatgagtcatgcagttcatgtagttagtcagttcatgtcatctccaagatccacacatgatgctgcagtactacggatattacgttatatcaaaggcaccctgtatcaaggtataaagttctcatatacttctgatatttgtcttcatgcatattcagattcagattgagctggtgacatcacagatagacgatcaaccacaggatactatatatttctaggcaactctttgatctcttggcgcagtaagaaacaaagtgtagtttctcggactagtgcagaggctgagtatcgatctcttgctcatacaacttctgaaattgtttggttgagatggcttcttgaagatatgggagttcatttatcagaacctactccattgtgttgtgataataaggatgctattcacattgcgcataatgacgtgtttcatgaacgtacaaagcatattgagattgattgtcactttgtaagacaccacttcaagcaacagactattgtcttaccattttttctctcagaattgcaactcgctgatttattcaccaaaacattgaccttagctcgtctaaggttcttgatttccaaactcaacatgtgttgtaccatcttgagtttgagcagggtgttaaacgatattgtcctgatatcttgggataatatcttcttctacatggaaggtttatatttgtatattttgttcccattttcatgtatatcttgtttctctttttatctatgtttcttgtatataagaacaaatgtattatatcttgttcacgatgttgaatacaattttatcattcagaagatacatgtcgtgacaatctctgtcaattctatatgagtagggttaagagaccatgatcagcatgtgatggcaaatcaactgcaagttcaggttccgggcaaggagggtattgtaaagaccctcaagctcgtcagcgctattagactagtcaagagacgtcttagccgctaataactcgattagtttgacaccaacgttagtcaataggaattaatctaacaacgatctagataggaaaataatactgttgaataaatctcgaaaagtttcgcagaatggactactcgaacgtgtcaaccggataccagagtaagaagatattaaaccgcctggctgcccttaacctttgggtgggtgcctttatcatgggtcgttgacctgatcaccaaaacgtgtcgactcgagagaagactttcactttctcttttcttcttctttcttattcttaattcttcttctttatgtttctcttctctttcttctttctatgttcttcttatgttgaagatcgagagacgaaattaaggtgtgattgagtgaatcaaatcgtgtggatctataaaggaatgaggagtttgtgtttctgttaatcatgaagaagaagtttgagtttttgttataaatttaagatatggtttctgaaattagggtttatagagatgatttaggttctgaagattgagaagtaaatcgaggtattgatggataaagaagacaagggttgttgttaaatcaatgaattaaagaagttaggttatctcagagatttgaattagggttcgaattagtggatgaataagaaggattatatactgggtatgggttataagagttgaatcgaagtttcaatttaattacagagataaaagaatcaagaagttgtttaggttttgaagaaaagtcagagaagatgaagttgatgttcttgaagaatgattagaaatgggtctgatgtggaataggagatgagattgacgaataactcaaaataggagttagggtttatgtgttcctccccaaaatcaagaattagggtttgtataccgattgaagatgattgagaggattacaatggagttgcaggtgaggttcttaatctcaggtgatgaatttggtgctggtgattgatttccggtctagacagataattctggggtttcaattgaagtgttggtgaagtaataattcatagagtactagatattggttggatttaaaggtggagatgtattatggtttagatgaatgatggtgatgatgtatgtgtcgaggattacttgcactggtagtgatggtgttgttgaatatgatggtgatgttattagttgaagttggaactgttactggtgttgagattgagttgcaggtgatgttgttttggtaagtacaaggtcatgaagtggttaagggagttgttattgatctgagttgcagatgtgataattgaggcatgtggtatgtgataattgagctttgctcagctggtagtgatgaagctgcagtttatgagattggtgtagtttagatgagatgatgatagtgaagtggtaagaatataatgaattggtggtgaatgaatatggagaagttataagctgagttccaggaatgtaatgtgaggttaagttatgatgtgtgggtttgtgttttgatttgtaattaaggatattatttctggaatgagagttattaactgaaagagaagtaaattgtgttggtgaactgtggatgttggattaagttacagaaggtgttattgctggaatgaagattagggatggtgattgtaggattatagatagtgactcagggtcggcttgcagctactgcacttttaggtaagctagatttgtatttgtatttaaattataaagtttaaatgaattgaatggttgtaaatgaaggatgagttggtattgcagttgaagtaagtggcgttgtaatactgagaatggtgattgtagagttgtaaatagtgattgctgtgaaagcttggaactgctgaactgtaggtaggctatagttgtgtttgtaattgaattgtttaattctatttgaatgaactgatgtatgtatagattgaagttgaactcgagttagagttataaagttagaatcacagttgcgtaagaagttttggcctgtattatggcctagttttaccattagtcatcctagtcggatgactcagttaatctgattgagtcacatgtatacctgaatcagtcttattgactgaattgacccggaccgattcttgtttgactcattgaccgagttagactttaaccttggactgttgacctgaccttgaccgtagacttttcttgaccattgattgacgtttaccgttagttgaccctttgaccgttagtaactgttagttgactcggatggactggaccttagatgaagaggctagtttagtggacttgggcttaggaatagactttttatttgttgaattggaccacttatggtctgaattagcttttggttccttctacaaagttgtagacattcgtaatacatattcaatggactatagaaccaacccaattcaattagtaaaccttagatatgctaaatatagagaataaaaaggtgtaatgtcataaatgggcttagaaccattaggtagacttgtatgattcttgtatgagccattttggctagatgcttagagtgcttgtgtgataaacagttagtctaataacaacgatcgattcaaaggatgaacttgtgcattttggatctcgaggtaggcgtggcttatcatcaaaagaggtgggaatacatttaactcttttgtgatcgttgatgttttttttacaaaactttatgtttatcaaacttatgcattgtctagttgtgcgctccatgctttatttaaactgtaatacgattgttcagttgattctttgaatcgttccatggattggaaaggacctgtaatgttttgtttgtccttatgaattgtatgggaaatcagaatttccacgtgtggtatatgggatacgctccttcacatttatacctacttcctttcgagcttttatgcacatgtctagggcgatacaccataatattattattaggtgttggaatttggcattgaatattatatattgtttgaagaagaagtttgttccatatacatgattgtttacttcagtgacttggtcgttattttatgtttgggaaaacatgtattgttttccaaatcttgcctttgattacttaaaagttaaatgttattcctactgggcaccccttttagggatgatgttctcacccattcccactttcagtttcagagacagatcagcgttctgcagcgaaagcttcgaggagtcgagtccgtttgttagattactttggttatgtttattatgttgcatattatatttgtaaacctaatgacgattgtacatgtatcatttgatagtcgatcttgtatatatttctgagagggacaagttttgggttaaatttggtagcagatttcttaattgaatgtttaaataaacgatttagatttattaatgcttctttattagttaatctcttggattagttagctgctcccttagggggcactacaggtatatatttgcagaaaacttttgaacaacagaatttagttcaagggacttttcgatgtgctctttctctaattctagtccctccataattgctttgagcagttcttttattatttctcttgatcttttgttgtactcacttaaaacctgattgtatgaacaaaacaaaatttagccaggtgcatttacaaactcggacaagtctaactgagtatacacgtttaagaacattagaggtttacctcataccctagggtttaacaggggaattaaacactggatgcactaagaccctaagataatccctccaaaagaagacactctcagaggtagggttgaaattggttccacacataattgggtccaaaatgcacgggtctgaagcattctctccgttgtaaaccgacttttcttccggacttaagtcgaaaaaattcatacaggagttgatcaattcctcttttaaactctctggaactccatgcttaaccacctataattgtcacccgagcaaactcataataaataaactacttcaatatgcatgtaactaaccaattctgatcagaaaaaaactgaaactcaatcaagagagagaatgagtcgtacaagtctaaaactcagttcacctgaaactcaaacttcggttaatttctagacgtttctttgcctcctagctcttcaacggtcttatcctaccagttgtttcccggatttcaaccggaatccttctttcttcttcctctattctctcttttgcttccatgatcatcctccctcatctatgaattatcaatagatttatttccttctctttctccctttgttttctcctttggtttccctcatgaaaagcatcttacaaatcactgttatcactggaaattctaaaatcactaagaacaccagcctcaccagaatcacaagaatcacaagaaccattagaatcaccagcattatcaccattaccatcatccggatcacccacatcacacaaaacacttatatcacaaaaattacaggaatcactaaaattacaggtctcaccaacatcccaggcaagtccaacattcaaaactttctaagtatctcaaaaaccaatatggaaaaacactcatcctagttcagggaatataattttccaattcatactaatcaccaaccttttcttcttaaattcttcagtagaccatctttcatactcaatgctaacctcaaccccattatgagtctccccactaattctcagaaaacctatgttcttaaactaaacaacggtatgcacctaattgagctgatttctagactgaaactcctagaagaaactcatattcagaggtctcatgatattattcaatcagaagctactctagcaaatcctatcagttctcaattgaaggtcaaaaacaccaaaattcggagcaaaaataccatactcaaccacaaattcaaaaacaacaaagacccattccaacaaattcataaaaacatacataaacaaagtatccatatcaataccataattcataaaaccaaaagcaagcaaactatgtttcaaacaaatcaaaatttaaacttcggttctcctcacagaaagataaccgacaacccttaatcaaaatcaaaattttcattacttgaaatttgattacaagaaactggtaaaccaagacgatcactacctacctgtttcgctgagttcgactccgaattccttgactaacactgcgagtctgacttcgagtcaatctcctggttggccttggaatctgaacgctggtcggggtgccttccttctcctcgtggtcattctcgaaatatgattggtcagactctacattgataggactcaccggcgacatcgaattggcagctggatcggaggttggatcggtggtgggttgactagttccggcaaagatggcacgtccaattttcccagtagcagggcagagagcatccaaaactggaaaatacatgggctcatcatcaccccaaggctgcgccaccaaccgacgaaccatgaattgtgcagctgtaggcagagtgatcgactgaaacccaatcatactcaagccagatatgagaaatctatcagcagcaacaacaactccctcatgcacttcaaaaggcccgtatttcggatgataagcgtacaagacccaatcatcatcatcagaaccgtgtcgctttggcttctttactttctctggtgtttctgcagaagcacttatctcactatgatgggtagtaccaggcattctacatccaccctgctcaacaaacaaatcaggcctaacaaaatgattacctatatcttgattcacgggagaaggtttgggatccttgaagaactgaatcaacctctcaactggccaatcgattaacagttcatgtaatcacctggtggacaatagtgcaacaacctctcagcctcaatattcacatcaatattatgttgcatatccctcaaataccaatcgaagttctctctaaagttgggatattcacatccttgtggaaaagctattccatgaggcagacgataaaccaaatgctcatatggataccagtgtataagggtctccgtctctacttcattcaatttgtgtttgcttttacgatcgacgggtcctggtcctccatccatgatgaatctctcagaaagttcttagaaggaaaaattgcagaggataaacaactgtttcctctcccagcaagagaaaaatcccttttaaagaggctcattctaaaaacctcgactgtttcgccaataaattgcgtcgattcccaacaccgcttcttgcagactcaacctttctcttcctctaatatatctgtcgtttcaattctcccacaaataggctattatagcctttgttgcagaaatgctctctccacacgcttaaccattataactgttttgttgatggtcctgacaggtggcaacaaattggttgacaactcaacactatcactctccagatggttggcatgcaacaactccctattcctcacacaaaccactcgcacagttctgactcagctacttaattccaacataactcctcagacacaagctgagtcgaaaactagttgggctgcaactgtttccaacatatttgacgagcccattactacttggcggcagcccaacatgaatccaaaagggaaatcaaagtccgattacactctctctactccatttatagacacagtagctagtctaagtacataggtaagtatgcacccaacactctttgattcaaagtctactaactttgtagtacaaagtgttgtcattgataacaggtctcgatccaaactgccattagccatggaaaaccaaggaaacagctttattgaggattacagcagatacaattacaaattcatcagtctaattttaaaacttcgtttctacttcacttacgacaaggctcaatgtatgcccgtgaaaaaatttcaaattaaagttagtcatatcaacatcactctctcagttatatgcctctctctctttttccctaatgaacataaccccctttcataccttcttctctggtgccatagtttcaatttcatggcctcctcctctaattcaaacccacaatccattgatgacctggtcaaacaaatgaactctgccctaaccatccctgatgacttgttcccaaaagttttcatcaactctgaaaacatcaaatctaaacaaacccaagactggaaatcctgtttcataggaaaactttgtagcaacatttgttttcaaacctccagagtcagtaattttatcaatacaaactgggaaatgcttagcaaaattgaggttgaagtttggaacaaaagaagaaatttttttatcctcacaaccactcatgaagaagactatttaactttaagaaatggttctagttggagttcctgctaatgtccctgagctcattgataaataattattctccaaagttatgatatggctcttagtgaagagaatcccaactcatataatcccagatataccaagcattatcagacccattggagtctttcagggagccaaaaaaccttattgaagagacagatttgaaaaaaatttggaagttaaagtgacaatcaatgttaccagatctctcaagtttggtatacaagcttttcaaactcctactgtctctcactggctggaatgtgcttatgctctcaatgacatcaaattttgtaaagtttgcagagtgtttgatcatcctagtcccccctgtccctcacctcctaatcaaaacaatccagattactatcatttaccaattcctcaaccagcacctccaccactaaccctagacaaaatattgtgcaagcaggaaaggatatcatccacagaccttactctgatgcagatgctgctgctgaatttgaagcaaaactgaaggctgctaaaagattggagcttgaaaagtccatagctagcattacttctacctcaaattcccctatcacctttggagctcagtccttgaactctgactcaacacctcctccacaccctgatgttttagcctgtcaaattataaacaaaagaatggaattagcaaaacaatagttgtctcttacaataaaatacttccaaagtggaaaactgttgcaagaattagtaccaacaacaacaatgatccaagaaaggttgatgaggaaacagctgctgctgatcctactgctgctgatcaaatttttccagtcaccaacactccaaaacacttacctttcaataccctacctacattagctcaaatcaaagctaacatggaagctgaagctaataagaagaaaaaagctgcatggaaagcaaaaaaaaaaaagatcatactttgatgatatctttcttaacacctcatccacacctattttagatatcaagagaaagaaggtcacccccattgaagctaatactgccctcaacagtatgaacatggcaagttttaaaagattcaaagacctaaatgttacttctcaggagcaactggacaacatccatttactcatggctaatggcaattcggactcctcctctgttggaacaatggtatttcctttgaccacctcctattactttctctttataactcatgctttatcctttattgtgcatttcctgttatttggtcattatgacaatataattagaagacttatctccaagtatccagctgtgtcctatttttggcaattctttacttccctagcatggaattgccaaggactaggcacaaagatgctaagagatatcttaatgatatgcttaataaactgaaccatgacattatattcctatctgaaactaaacaaaagcatgataaactaaagaaaacaatgcatgacttaggggtcaacaacttctggtcagttaatccaagaggggcaagtggcactgctggtggattaacattgatatggaaaagcaatatctccatagaaatcttggattattctataaaccacatcaatgcaataatcagcactgccaataggcccccttgattatttacaagctactatggcaatccttgtgacactcaatccaagttaaactcttggaaaatccttgagaaatctgcagtttccaataaattgccatggatgcttattggggatttcaactttattctccatagtacataaaagtttagtactcaccccatagatgccaataaagcatccattcaatgaaaagatccttaatttggatatcattgaccttggtttttctggtttcccttttacttggtcaaacaaaagaaaaggccatgctcttattgaacaaagattggatataagcctagataatgataattggctggccatctatccaaacaccactatcacaaacatgctagccattggttctgattatcaccccatcttactaaactccaaccctcactgaaagaatggtaaaattccattcaaattctttggtccctggttagatcatgctgatcgcaaaaaaatcattgctgaatgttggaaaaatattactcctggttcaagtgttttttctattgccagaaaacttaaagacattaaactacaaatcagagtttatggaaacatcaaaaccaatattgatgaatacaatcaacacttaaattggatacatactcactacttcagagcagacagaggacaggccctagctgatgctagaaaacagttcaaaaattggcaagacatagaagaaaaattctggaaaactaagagcagggatcaactcatcaagctgggaaataagaacacaagttacttccacagatccaataaaagtagaacaagaaggaataaaatagaatctatccaaaatgaggaaggcaactggattactgagtgtcaagaggttaaggaatgatttaccaatcacttgtctcagatggcaactgctaaaataataaacccctcctctgaaatcataaaagctccagggccagataggttcccaccaaacttcttcaaactcaactaggacaccattggcaatgatattgtcacaatggttcaacactttttcctctctggtcacctttttaaggagataaatgccacctttatagccctcatccccaaaattgacaacccaacttctcctagtcatttcacactaatcagcctttgaaacaccacctacaaaatcatatctaaacttctagctcagagattgaagccctttctaaacaaaatcatatccccctaccaatctgctttcatccctgaaaggcaaatatcttacaacatagctattgctcatgaaattatacacactatggcaaaatcttttgacagagtggactgtggtttcttaatgaccattatgaagaaaattgggtttgatgatcaatggtgcaacaagatctatcaatgcatttgaacctccacttcagctgtcctcatcaatgggtcccctgacaaattcttcaaaccttctagaggtctaaggcaaggtgatcctctatcaccttatctatttttattctgcatggaatctctttcaaggactcttctgcatgctgaggagatgagcattatcaatggtatcaagatctgcaaagctgcaccatctatcagccacattctctttgctgatgattgcatgatattctgcaaagcaaacattactgaagctcaaaatataatgaagctgctgcagagatttggcagcacatctgggcaactaattaattttcacagatatggagtcttcttcagcaaaaacactaatccagacctcattcctcagatcagcaattatatgggagttcaagtgcttcagttggatgataaatatctaggctcacccctcttcacacatagaagcaaaatcaattctttcaaacttggagtagaaaaattgaagctgagacttactggctggaaaaatacacctctaaatcctgctggaagagaggtaatgatcaaatctgtaacatcctctgcttgtatttaccaaatgaactgtttcaaggtgcctaagaaaacttgcaaagacatcaaaaatcttcaaagaggttttttatggggaaaaaatatagaaaatccttctggttattatcctaaagcctggacagtagtgtgcaagccaaaagaaatggggggtctaggattcatgaatatggaactattcaacagctctataataacaaaaattgtatggagacttgagcaggataaagactccttatggtacaagctcatggatgccaaatatctcttaggaagaaatgttcttaacatgaatacaaaatcaaaggatggggactcatggatatggaaaggaatcctggaaggcataagaaacatccaacaacactgctcttggaggattggtaatggtagaaagatcaaaatctgggaagatatatggattccaaataccacctcaagactaccaaaaccccagaactgcccacagtacattgaaaagctagaatctctgcttcttccagatgaagctcaagtttatacatacttcagcaatgataaggatgctgtgattgttacactgcagacacacccaaatgaagaagacgaaataatatggaacctcaatgatacaggagtgttttctgtcaaggagctgtacaaggcaaaaattggtcacctatacagaaatgatactctaagtggcaactgggaatccatttggaacatggaagtggctctagtcatcaaaatctttatctgtaaatgtgcacacggaattcttcccactaatgccaaaacaactagcatacttcattacataaatcctacatgcactgtttgcaataatggggaagaagaagccatgtctcacttgttcctgaattgtcctgcttctactttggtgtggcaagaaattcttggatactctcatactctctttgataacaataccattttcattgactggttgaattcctggttccaccctggaaacactagtactaactgcaacatttatgccactacttgttggtatatctggaaagctagatgtgattttatattcaaacaaattcagcctaatgtgagagttactactctgaggattaagcagcatctgtgcaatcataatagaatacatgttatgcacgatcgtatcatgaacagtttcccactcttacctgaggaaactgacattactttgcaacacaacattactccttatacttggaatgcagaagcagggtttgggaacaacatcagtatatgcacactacaagatactgagaactcattatattacactgctctaactatgacagattttgcaggaaaacttcattggcactagaagacatccaggacactctggagaagggggaaccacaggaggggcagacctagctttccagtgggccaaagaaatgcaacacacaaacatcgcgatatctgctgaatcaatggatattctagttcactttaagttgctctaccatgaagccgctcaaggaagatttcatcttaattattatgaagaagacacggtcaagaagaaagtagtagaaatatggtcataaaacccatatcttttgttttactaaatcttagtatcattcatcgtacttgaaacatggatgcctttaatttagctcttttttgtaagaacaatgctgccaggctgagtggtgcatccacagccaatgccaatacaactcctttgtactggtcttagtgcctttctacacctgagcttttcctataaaaaaaagaatatgcatgtaactagtgcaaaaatcattataattcaaattctattcataaataagttattaccatgaagaatccccaatcgcagacatgcattttgaagctcttcgattatcttagaccgttgggcaggtgaaatcattaataattacatgcccaattgcgcatcaccatgcaattgtaaatcattgcccaacgaatctttatggacatgggtgtgtgtgagaccaagagtggtggctaataccttctcgaaggacaagtgggccaaagtgggcgataattcaataaatagcgcaatgaagatccacctacgtctgcaagcattgatgcgacagactgtctacacacaccgaagacagtaccgtgaataacacttccataccgtgataattcaataaatagcccaatgaaggtccaacggcagcgacgagaccaggaatttatgtttgggtggactaaatttttttttctcgaactctgatattaattcatctcaactgcgagaatgacaattgtagcaatatacttgaagcgagtatgtgtatgccacacgatctcttttccttagagcacaaagctttgaatccaattttttcagcttgtaactaatattaaggacaaattatttgcgtatcgacaataataatcctgatttatttagcgggccaaggccgtccaatttttttctagtttgaaaggttattatagggatgcaaaaatatttggagtctgtacatatacgcataataagtcatgacatattgtatttttgtctcatgaatacactgcatttttagattatatatagatatacataaaattgtagtcacttcatagaataaaaatgaatttttggacaaaaacttgttttttttcaggtggacaaacgtttgcttagttaaggcaagtcacccccatttgacacacagttttattttatctgacatgtaacaggtgagcccattcaatacctgattttaagaaacatcatggatacttgtttttccctgtagcctttgaacggttgagatgctattcaaaaattaatccatgtgggaccgggttccaaaatcttctgatttcttccacgcagaatcatatcttaacaattaatgggctatttaaaatttacacatgggtttacaaatgttaaaaattacactaacaaaacatctttcacggaaacttaggttaaagcccaaaaaaaaatattaatcttattggtaggctcaaaatatttttcacctaccctgacacccataattattcaaaacaaaactagccataaaaaaccaaggtgatactctttaagttacacaaacaccagccatattatttgggcttaatgcaaaccatatccaagaaagatgaaacaaaaactccatttcaatttaaaaatattaaatttagttttcattactctttcaatttccaatcctgcccttcaccggtacgcatatgcgtataaatttatcttcttctctcttaattcattttgttttcctccttccctaacagcgccactacctccaaccgtcgcaccaccataaaccaccaccagtttcagatctaataccaaccttcttttttctgctactaccatttacatcgtcaccaacagtacctccgcgaccaccaaccagttacgacgttcagatatgacatcaacaccagattcacggatctcttccaggttagtaacttcatttctacacattcttttttttttttttttttcagattgatctcaatttttttcgattgaagtaatcaagattctacaatgaaaattaggttttgattttggtgtttaagaggttcgtcattattgaaagaagatttagatctgttaatttcagtttcagtttcggattaaatgtggtggaatttgaggtttaatttccagggtttttagatctttgaaattggataaacacacagaatttgactaactttaatttcatcgctttgagtgccattacttgtattatgtaattttgaagatgatgttaaaacattgtttattgccggtcttggtggattaaattcggcttcgaatcctccatcaccaaggaatacagtagtggtggtgaatggatctcatggggaaatgaactagtgatggagatttaatttgatctgcttgtgtcaggggaaatgatgaattttagaatggttattcgaagtgggtaaataattatactcttattttcattgatttttctattatagaatttgttttgccattttttcccaaacaacaatggaagcaattcgtccgtctgttctgttgaaagactcgtcagtaaccgtctctattgcagataattgctttataggggatggcaataccaaagtaagttcctttttcttttttcatttgatttcatttcatttcatggatctctcttagtctaaaatgttttttttttattctgcagatttgtaaatttcctaatcaacatacaaaattgaaggatcgtcaatttaccgctattctcatggaaacttggtgtttatttcttcaatttttgcagatatgtcggcaaaattctcacaaactttacaaatcagtgatcgcaatgattacatcgcaccatcacaagcttgcatagtctatctaaatgggactacgactgctaagaagaaggagacatcccaggtggtggtgactttagtttcaataagaattttattgatttctaattgttatatcaaatgattttttttgactaattcttgtttttgtttttacagaaccaagtggtgattgcacctatttcctttttcccggaggtgacgaagtgataaagctatgcttagcctattttctttttcccggaggtgacaaagcaataattacagtgccagaaaagacatcacaagctttggaatctccatgttggctaatgggacctggtggacttatcagcgtcatggtttacgtcggacatcctggtggaaggtaatagttctgctacagatatatggtgtatcttttttcatagcattgttagctcacatggcaaagcacacccgtgtttattttttttccctctggacttgcttaagtccacaagtaaatccaggtagagggtcaatggattttttttccaaatgtaaattgactattatttgtggaataaagtaagaaggggccatgttaaggtgactgacctcattgctgatcatgtcttagcaccttaattgttgatcaataaaacatatcttgatattttacttttgaaacctcccaattcaaccttccttcaccgttgaggactttctgatctgtatgttagcaaggccttgcccaacttccatacttgcagaaacaactaacttgctgaaacaataacttgagggttgccactatgttcatttttgcttttacacaagctaacatatttcttcttgcttccaaattttggggacactatttcttatgctaaaatatgaataccattcatgtttgttctcaggtagaagtacgagacaatccaatcctctgcttctggattacaatccgagagttgggtttgctgtaagtttgaaatgttaaatcgaccactggcgccagttcttgtattgttatttaagaaatgaatatatgtttcctgtatgctatattcatataaaaagaaaaacagggtcttataagcatcagaaagagttgtgtttatgtctcctttagttataattagctcgttaattgctagactgtggtcgtaaagaaggaacatttttatttttgaaagacatggtggaaggttggtttttcttgttggtgaatgagtatgttgcaccagtctaagtaacaaagtcatgttcatgtttaagatttagttatgatgatttaggagctaaatatgtaacatattgatttttgatatagcatagagcatggatctgtgttgctgtgttgttgctgtcttggctagggctacaaggatgagaagaagatggtcaatgaagaagatggtgctgttgtggatagacggaggatgaaagtagagctgatttatagcagatgatgctgtaaactagagaagaaatgaagcttaaatgaagtgcagctactgatgaattttgatgaaaccaattatggtttcatcttatttatgatgaaaccataatcggtttcatcgtatttatgatgaaaccaaaattggtttcatctaatttttggtcagtggtggtggtggtcgtcggcgggtgttggcgatgttgctggttttagtcggtggtggtcggcggtggtcgacaatggtggtgctggaagttgataatatgtgttgtagcatagagcatggatctgtgttgttgtgatgttgctatatccaagagaactgcaacataagatccttgttgaatttttcttgtagttgaattctgatgaaaccaattagggtttcatttattttatgatgaaaccataatcggtttcatcgtatttatgatgaaacaaaaatcggtttcatctaaattttggtcggtggtggcggtggtggtcggtggcggcggtggtcggcgacggcggtgacagtcggaggtggcggtggtggtcggtggcggcggtggtggttggtggcggtcggaggcggcggcagcggtcggaggtggcggcggctgtcggaggtggtggcggcggtggtggtcggtggcggcagcgacggtggtggtcggtggcggtggtagaaggtggcgttgcttgttggtggtgacaatataataagaattaaagtgggttgatttttgtttttgttggggtgatttaaactaagagggtaatatagaccaattatattaaatggggttttgtgaacaatttgttttattggagtttttgtgtatggatagtgacatctttggggttttaactcgcggaccgtattcaaaattataaatagatagtaacaagacaaagttacccttaatatattacttgtaaaaggaagaaattttggattttctatctgttcagtaaaaaatctgcatgacgagttatgcgtcctattttttcaggggtataattggtatgcaaacttgaatataatacatctaaaaaaccgtgccttagaattttacaaattttatctcgttggaaagcttttaaagcactccacaaaacgagtacaaacaacaatatcaaatttaaatttttacgaaaaaacggttattttagggagaaatttcgaaaacttgatagattaccattatgcagccaccataaaggatgcataacacattatgcaaagaccacaaaggatgcataacaaatcatgcaaccgtatttttggtttatgcatccactagttggttatataaccactaaaacgaatgatatgcctaaaaataatgaaagaaagatgatgcatgacacattatgcaaccaccaaaaaggatgcataacaaattgtgcaaccatattttggtgcatgcatccatttatttaattttgcacccgctaaaacgcggtataaacctaaaaagtaacattttcaccaaaaaaaaaaatgaacaataaagtatgcgatcattttctggattatataataagttatgcaacaaaatttgaagttgcgtaacatgttatgcagccgttttctgatcaattttaatgctaacaaaaacgttgttgcataaatgggttatgctgccattttctcgaatgcataacaagttatgcatctattttctcggatgcatgacaggttatgcagccatatttgtagctctatatagattatacatccaggttatgcataatgcatcatgcaaccatttttcactgcataacaggttatgcatacacttttatagctgcataacagattatacagtcgtttttcagtgccaatgaagaaaaaatgacggcatgatgcattatgcatccattttcatgactgcgtaacaagttatgcggccatttctctagttgcatatcttattatacagttacacattacacttatagtttcaaaaaaaagtccaattttgttttccaacaacaaaccatttattcttgaacataatacacaagttacaaatataataaagcctactgactaacaataatattacaataagcaagggggcataatcttaatctcaaatttatattggcgagttaaaaaatccatccatctttgtttcgttgctaatcccagcaaagtttaacataaaactcatgaagattttcatttcacaatcaattttttcagccccatgatcagcaaataagactcacctttcatactaaactggcggattcctcgaccgttcttatcacctcttgttgccttttgacctctcccagcttcaccgccagcacctccaccattatctacacccccacctctactacccccaccagcaccaccgccactgtcaaaatggctgtataacttagtaaagaaatatatatttatttatcacggttatgtagccgcataactagttatgcatttaatttggtatgcataacatgttatgcaccctttaaagatggatacataacctgttatgcgccttttcagtttgttgcataacaagttatgcagatactttaatctgcataacaggttatgcaccctttaaagatggatgtataagttgttatacaccctttcagtttattgcataacctgttcaccatcaatacatgataaataaaaatgaacaaaaaaaaagatcaaacactcatctcgccgaagtgaagcatcaactagcatactcaagcaagacaacagcagttgaaccaaacactaattaatcaccagcttgaacaatctgaagatagccaacataacatcaataacagacgaaatcaatatgagcaagcacctctgtccgaccactaaaccaaaactcagaaagaatattccaacctgcgcattataaatacatttcactaatcaccaataaaacatattagcagccataaaagtccataaagagtttaacaagtggatgactcacttacgatgaggttatgagtttttggcgcatagttttcaaatttctcttatgtggaggaacatacttgcccaggctataaactaattaaccagcaacttctaacaacactgttttcgtaagaaaaaactgaaattacaactagtaaaattacatggtcagcgtcgacacaattacattaagcattcaataaaataaagtttacacatgagcggtaacacaccacattaaagtgaccattagatcatacattcaagtgtgtagtcaattatgtaggagaatgataaataactcgccttatcatatgctcctgtctatcataatgagttttgcaatgtacaggttccaagcacaggttatagaaattaaattttaagaacttacaaacaagaattcaactcatcggtttatagtttataccatcgaccttttattgtttagtcgtgatttgtttattgcccgatttacgatgattagcgcaaaaacaagttcagctcaaatgctcaagaatgtatactgacccgctcgaccatctttcttcttcgaccttaaagtataccagcctaaacaggcaccatttttttaagagcatttatatgaatagtaaaataaaaaaaaaaacaagaatctaatagtagtgtcagaaaaatccattgcgaaataggcaaaccatctataggataggtacaagtggtcaatccatattgaacacatgcattcaactcattccttatcttgtttcgtacagtagccagaactcttttcgattgtgatcctttgactattacaagttgtcaattaacaagatcacatgaacttgctttttctttttttgatttagactatgacttaccaactaatgcactagatgtacaaagaatcatactcttttaagcaaaattgcagaatcacaaactcaatatccgcaagagtttcatctcagtaaagctaatattacagtaacagacagccttgtatagtaatatcattttatggtctaattaactaattcgcatcacgaatttgaagggccaaaagcacacataataggagtactactgcataaaaacatattcaacttaaaccacaccaaattaaaaagaaaaatccacaaatcccactcaaaagcttaaatttgtgaaatttcacaaacttacttatacattgacatcaaattaaagaccaattagtataaaatgcttcttaataagtactaaatcagaaatttacctaatatttatttaaactaagaaattaaaaccaatatcaaagcttgaaaaaagaaaactaaaataccttttcgttttccattttagaaggttaggactccttctccgcctgctccatgattaggccccggcaacgaaaaccaactacagaattggattcacttaattaatgattgttgaacattttctctgtcaatttataaaagaatttcgaataccttaacagatcgcataaaaaaaaaaccttaaaaaaaagttaaaattgaaaaacaccaaaaccaaatcgataacagaaaggaaaaatataacaagatagaaaattattttgaaacgatgaaaaaatttttagaaagatctgatctctcggttactgatcttcagataaccctacaatattatcttgactctctcactctctgaaaaaattgtacgaggaaaaaaactaaaaagagaagagtaatcgggaaggtcagtttggggaaccagaaaagcaaaaactattttttcctaaactaaatctctgaataatgggagtggccgtagttttcacttttacttttagaaattttggggtgggcttcagcctgggtaagcaacctctaataccgtccctgtccaacggcctccatcaacttctcaaaattgggattagagcagtggaaatgggtccatttctctttatctctacccgatgcatttctcggtgcttaagcgaaatctatctagcattttgttgatgtgaacaaataaatacaaatgttagattttattgaatatcttattcacccactagatatttagatatgacattgtgcttcaagatagtccattataggtactagagattgcctcgttgcctaaatatttttatttttttatcgccgaccaaatcttttttttttttaatcggtaacgacgaagaaaatacatgtttaacaaatatatatccaagcgaaatagtaaggttaatttcatccccttaattccgcacaaaagtgagaaaatgtgtgttcttccatctgatcaccgtaaacgatatccacaaggcatttgttgcagaaatataattttcatcgtggttcatctggaatccaccaatttatctattcctcttgtatgcaagataaccgcaagatactgggcttttgcaacactctacttctgtcctattgtgtaaagtgtcagttgagtatttgtaaagatttgttgtgcggatttgattgagatttagtgaagaaaaggagatctgatttgctttgattgtgtataaagatatgattttaactttattattaacatgaactgaagtgattttgatctataatttgattttgatgctagatcctgtttaagttgtgttggatgcttgtctaagtaatttggttttcgattttttttaattctgtaaatacatggttcttgcggaggtaaaggtagtggtagtggtggtaggatcttcaatctgaatgcagaggtagtaatatttgaaaatagtactaaattactaatcgagatcttcactttatttattttctatgatcaacaaccgattcttactaggtgaattttttcaccgttcttctatcactaactgtcagttatcatatttccatcttatcataaattcaatcttatgtttgtttctaggaactttaggtatggagatatggcctatagaaagtactaaaaagcagttgcttgtgtggatttgattgagatttggtgaagaaaaggattaactttattattaacatgaactgaagtagtggttctcgttcctcagtcgctacattagcttgggaaaataccttagatcgtacaccatttgcccacgtcctcctgctcatgtaggcatggacccaatctaataccttagatcgtaccaagttctgcaacaagaaagatatagaaagtgagaagaacaacaaaaatcagtcctaatcacctaaacaacaaccaaacttcaccatatttcgttgttgttagattatcttgcaacttagaccggcaggttagatcgtagacatcatcaggttaaaactggtagggtaagcagtggttgctcagacccttcgttgaaaaaacactagtcatttattcattagacatcgagtgaaatatagatataagtaaggcatatccacttgagagaaacaaagagacctgaaagattgatatatgatctgaagatctgacaagaaagttcatcaaatatagagttcatggagacaccaatacttatcaagctaggcaatggtttgtcaataccaagtgttcaggaattggctaaactcacgcttgcagaaattccatctcgatacacatgcaccggtgaaagcccgttgaataatattggtgcgtctgtaacagatgatgaaacagttcctgtcatcgatttgcaaaatttactatctccagaacccgtagttggaaagttagaattggataagcttcattctgcttgcaaagaatggggtttctttcaggtatacaaattttgattatacgtagttgattgacgactatttagtgttttactagttcatgctaatctgctttatgtttcagctggttaaccatggagtcgacgctttactgatggacaatataaaatcagaaattaaaggtttctttaaccttccaatgaatgagaaaactaaatacggacagcaagatggagattttgaaggatttggacaaccctatattgaatcggaggaccaaagacttgattggactgaagtgtttagcatgttaagtcttcctctccatttaaggaagcctcatttgtttccagaactccctctgcctttcaggttattgtttctctccgtttgctttttctcaatgccgcacgtgatattttttttttttaatgttattttggttggttcagaatagtttcatcaatatcgtctaggttgctaggataaaccatggaaaatcctgtctaggttgcctaaaattcacattcggaggcagtatcaagcaatccgggtttgtgaattgcatggtttccaaaatatatcgaatccaaacatcatgcatccctaaaatctgtcagatggaaaatatactgaagttgcatttgatccctaatttacatcctttatgcagggagacactggaatcctacctatcaaaaatgaaaaaactatcaacggttgtctttgagatgttggaaaaatctctacaattagttgagattaaaggtatgacagacttatttgaagatgggttgcaaacaatgaggatgaactattatcctccttgtcctcgaccagagcttgtacttggtcttacgtcacactcggattttagcggtttgacaattctccttcaacttaatgaagttgaaggattacaaataagaaaagagaagaggtggatttcaatcaaacctctacctgatgcgttcatagtgaatgttggagacattttggaggtatttaggctaagggcatatatggcctgcctactggtccttgttgtgagtacctgttttgactgtaccccgaaaagttgcttagttacttaatgtttcccttttacagataatgactaatgggatttaccgtagcgtcgagcaccgggcagtagtaaactcaacaaaggagaggctctcaatcgcgacatttcatgactctaaactagagtcagaaataggcccaatttcgagcttggtcacaccagagacacctgctttgttcaaaagaggtaggtatgaggatattttgaaggaaaatctttcaaggaagcttgatggaaaatcatttctcgactacatgaggatgtgagaaagtgtgaacatacattatactccacattgtgtttaatatatgatgaaataagttgcttttgaagtatgatgaaataagttggttttgaagaattcatattgtgcttaaatttcgtggatgactgagagatttattatgtaataataatgtattggtttgaagattctcgtctcactatatgtaagactctgtttgggtcaagtgatgtaatcacggttgaaataagttgcttttgaagaattcatatggtgcttaatattatgtaataaataatgtattggattgaagattgtcttctcattttctgttaagtctctgttaggctagggtacgttggttggtttctcatgctacttgttgtgtttatcgctctaatcttgatcccattgcttctaaaacagctactaaaggaaggcttggtggtggtgcttagaggtgtaaattgggttgtaccagcaccagcacaatctagcacaacacgctaaaatctgaggccatatcagcacgtgatttagtccagcacgacccaacatgttaatttcgtgggttgtgctggcttaacctaattggcacagtagcacagtacacgacactgtctggattttgagttgtcgactaaattaaagattcatacagaaagaattttcatttcgtctcaactttatgatacttttgcgtgtataatttcggtaatgatattctccactcttctcgcagttctattctcctctcgcgctgatgcggcgagtccaccgtgtacaagtgacaaaactttactaaaaaaataaaaataaaaaactcaaggttcacatgactcattttttttttccagcaaaacatatcggcttctgttccccttatctcttctctattttcagttaagttataaaggaaaaaaaaatctgaacacgaattttttcatcatttcagtgaaacatttatgtagttgcggaaaatcccacaactagacccttgtattgataataagattaagtctaagtcattttgatcaactcaaacattaatgatattattcagcactttgacacttatatgatcttctcaatctcttgataatgaatatgtattgttcttactgtagattcaaggtagatttcacatacaacaattgaggaatacaagatgaaagccaaatttaaagatgaaattcatttctttatttcttataattttcttagctatctctctcttaatcgacccctctctttctgttagatttctaagtccttatacaggcaaacttatcaatagaagacaatcatgattcacgtccaagatctcagttgactgattctatttcagtttgtcttatgcgccagacttttgagaaggtatgaatgtgcatcgtgttgtctgttgtatctttcatggtactcctttgaatatggtctccgtgctatctttatcacttgattatcttctcgcaatcttgtcttattgtcgcgcgactattcttcgccctgtcttctaattattataatatcttcgtgcttggagttgttttatctagagcgaagttgtgtgttcgccttgtgcaatatttagaccctacattttgcttcttgtcgcgttgttcttatgcaagtagaataatgcgagaattcttggtcaaacttcgcatcagtcctgtcttttcatcttctttgtattacccgacacacttatgtattttccgcgtaactgctacacgtgttgaaagtttttccttttcaagcgacacgtctttacttctttttatcggataaatactcaggagagagaaaaaaatattttattttctaccgtcttcctcctctgttcaacttcttcttcttccgtactttgtcttcttcctccgtgttcttcaacttcgcctatgtttccatggcagatcaaaatacgtctgctcccactgttgtttttgctacatcatcttatcggtgagttaattttgcctcagttatttgcattttgcgtttcttacgacatgactataatttctgtgatttttccttttccattgttatcgtattccaagctttgttatgttattcaatttcagtattccaatgtttattcccatactaatcatgcagttcgaaaccaaaatccggtaagaagaccgcagaaagttttgaaacttttcaagtagaacttaaaaagagtggtttcattctctcagttccagaggattcttctgccactaccctgttagacgaggagaggattcaaagagaaccatggagcgcgactcgcatgcctatcgcgcttggacaattaaaggagggtcttcgatccttttccactttttgatccagaaattattagagcactgctcagtcaaacttgcaatcgttgttatctcaagcttttttgtcaagtttagtgatcaaaactataagtcttgatttctagtctacttatagctatgtctcggactaggatagaatgtgtagttgatctttagaattcacgggattcatcaattgaaaacgaataactactaaggggagcttgtggaacttcatcaacaaaaggtatgtggagactgaaactaatatatcactcaaaaagtctgtttctactgtatctcctatttgagacaaaagtcgtatagctatataatattcgatttatacacatttgatatttcgagctgagtttaactcgcttacatatttctcgaaatatatgttggtaagctttcactttaaccaagttcattttatattcttgacgaaagtcaaaagatgatcttgtgaaagccatctggtaacatcttatatgatttgtatgagacagtcatttgatgtagactcggaatgtttcgtattgatcattcgatcacttgaaaatttctttgaagctaatagtctgtgtgagatagctattgtcgtcttctaagaatgtttcaatgattgaaatggagtttagaacacttaaccataattggattataaacatagtatgtgtacttgcatatatgtggatccaagaccggtgtggtatgcatacacgtatgtgtactggcaaggtcaggtaaagtccgggatctagagtatgcttacatgtacacgtactggcgaagtcagttgaagtacgggtactatagtatgcgtacctgtatgcgtactgggttcaactgaagtttggatgtgtgacagtatgcatacccgtttgcgtactatcgaacacagtccaagtccggctacttaggttggcgtacccgtttgcctacttgagcgggttatgttctaaaattggttgtgccatgaactaatacatttatataataaggaatgcaatctcttgcaaaccgtggctataatgttcatgaattgattcgagttaattaaaccaattttgcttcaattgtgtcttgtatacgtctatgagaatataaacaattgaacaactctataactagtttcatttgagtcatatgagctagttttggttaagatgaattagattgatatgaaagtgttcatatggataacttcagttaactattgttgagccaacttggtttacatgtttaggtacggttacccatatctaactgaaggtacattttatttgtgtgtaacaagctaagttcgatctaaaagttgaaagatattagcatgaatctaatcaggagttcatctaacggtgaatattgtttgctttgttccaaagctatcaaaccctgatttgaagactatataagggagaactctagcaactgggaaacctaatccacacacctcttgtgtgatactagttgcgactagagtcgattctccttcaaccttaggtttattccaaaaccctgttggttaacgacttaaagacttcattgggattgtgaagccaaacccagctattttttttttgtaattgcgtgttctaatcttactttatactatcgtgattgagtactatcttctctaagattttctcgagatttatctccaatgggtaagattaaaataagtcacgaacatcttcgtctcatcgtttatgattccacaatatcttgtttctcttccatacgattaacattattgtgagatgattgataatacttggatgtttttcgggaatataagtctggtttatcaattggttcatgtgcaccttgatttatcataagacgaaacaaaactcataggtatttctgtgggagacagatttgtttatcaagtctttgactttgggtcgtagcaactcttagttgtaggtgatatcagctaagggaatcaagtgcgtagaatccttctgggatttagagacgtaaggagcgcaactgtaccttgatcagtgtgagattggttagggatcaactacattccagtctgaagttcattggtagtaggctagtgtctgtagcggcttaatacaatgtgatgttctaagctggactaggtcccggggtttttctgcatttgcggttttctctttaacaaaattctggtgtctgtattatttcttttccgcattatattctctatataattgaaatatcacaggttgtgcgtaagttcaatcaatttcttgaatccggcctttgggttgttgattgacttgattgacacttggatattggtttgtgataccgtccaagttatttctcttattcaatcgggctcgcaaattcctatttgtttgattgtagattgatttgagaaatttagatataactctttgatatacttttccaaagattgagtctggctgtctagttgattctcttgaaagtatattggagttagtccattcagattgacgaagcgaaatatttggtgtggttgttagatccccgctttttcaattggtatcagagcaggaaaacatgtttaagacctcataagtaagaggaatcacagggaaataatagaataaatcaggtaagaggaaaagatgaataaatcacataaaaaagaagaacacagatgcatgaaacatatataatactcatacttgacattacataatagaaaaccacaaattacgcacaaagcatgaatttatttttcgctcgattgacaaagcacgcaatcaaactaaccaaaccacacgtaattatacaggtcgtaatgcaaattttgtgttcacagatttcacttttgtgttcaaaatccaaactaaatttgggtacgaagcctatgctagccagttaagcattgacttataagtttacggttccaagtctaccacgtaaaacaatcaatcacacaaagatatcacaagaatcaattacgttcacatcatcagtttttccgttaagcttatatagacccaaagtcctataactcttgcttaaaaaatcactgcctagttacaacaagttttccagattcaattaagatcttaaatatttttccatctacaacagaacaagatacaagattttcgcatatgctcggaacatgaaaacttcattcaatgtgagaatattacagatatgagcttctgctcgaccttttccttttatgcaacctctattgtatataagttactcaataagagtttctcgacatcccctatcctatgataggaggtgaacaggtctctgtttcaacaaacattcttggtggctccagagtccacctactggtctctcacattggttattaaaataacttccgacatcacgccaccaaactcgttctagtttgtttcaactaaattagcattaactttcttcttattaaggtttttatgttgtctacaatttactgccgcgtggccaggaattttacaaacataacactcacccttaactaaagtaattctggattcaggtttacgaaatatacctttatcatgaagaccatgcttatagttgcgttcgatgttctcacctttgccatctttggaagatttgtttccaaccacatgcggctattagccatgtccctcggagatgacacctttattaacaaatcacaattccaaatcagaaagtataatatgagttttgaagataacatctatatataaaaacttcgtttgaatcagcgtttcaaaaaactcatggttaccctcacaaaaattaatttagttaacaacaattttctgctcgtcagaatttttcagaaacgtttttctgttttgtaaaatatcaaacaaacgtttttctgatgatttaggagctaaatatgtaacatattgatttttgatatagcatagagcatggatctgtgttgctgtgttgttgctgtcttggctagggctacaaggatgagaagaagatggtcaatgaagcagatggtgctgttgtggatagacggaggatgaaagtagagctgatttatagcagatgatgctgtaaactagagaagaaatgaagcttaaatgaagtgcagctactgatgaattttgatgaaaccaattatggtttcatcttatttatgatgaaaccataatcggtttcatcgtatttatgatgaaaccaaaattggtttcatctaatttttggtcagtggtggtggtggtcgtcggcgggtgttggcgatgttgctggttttagtcggtggtggtcgacggtggtcgacaatggtggtgctggaagttgataatatgtgttgtagcatagagcatggatctgtgttgttgtgatgttgctatatccaagagaactgcaacataagatccttgttgaatttttcttgtagttgaattctgatgaaaccaattagggtttcatnttattttatgatgaaaccaaaatcggtttcatcggatttatgatgaaacaaaaatcggtttcatctaaattttggtcggtggtggcggtggtggtcggtggcggcggtggtcggcgacggcggtgacagtcggaggtggcggtggtggtcggtggcggcggcggtggtggttggtggcggtcggaggcggcggcagcggtcggaggtggcggcggctgtcggaggtggtggcggcggtggtggtcggtggcggcagcgacggtggtggtcggtggcggtggtagaaggtggcgttgcttgttggtggtgacaatataataagaattaaagtgggttgatttttgtttttgttggggtgatttaaactaagagggtaatatanaccaattatattaaatggggtttttgtgaacaatttgttttnttggagtttttgtgtatggatagtgacatctttggggttttaactcgcggaccgtattcaaaattataaatagatagtaacaagacaaagttacccttaatatattacttgtaaaaggaagaaattttggattttctatctgttcagtaaaaaatctgcatgacgagttatgcgtcctattttttcaggggtataattggtatgcaaacttgaatataatacatctaaaaaaccgtgccttagaattttacaaattttatctcgttggaaagcttttaaagcactccacaaaacgagtacaaacaacaatatcaaatttaaattttttacgaaaaaaacggttattttagggagaaatttcgaaaacttgatagattaccattatgcagccaccataaaggatgcataacacattatgcaaagaccacaaaggatgcataacaaatcatgcaaccgtatttttggtttatgcatccactagttggttatataaccactaaaacgaatgatatgcctaaaaataatgaaagaaagatgatgcatgacacattatgcaaccaccaaaaaggatgcataacaaattgtgcaaccatattttggtgcatgcatccatttatttaattttgcacccgctaaaacgcggtataaacctaaaaagtaacattttcaccaaaaaaaaaaatgaacaataaagtatgcgatcattttctggattatataataagttatgcaacaaaatttgaagttgcgtaacatgttatgcagccgttttctgatcaattttaatgctaacaaaaacgttgttgcataaatgggttatgctgccattttctcgaatgcataacaagttatgcatctattttctcggatgcataacaggttatgcagccatatttgtagctctatatagattatacatccaggttatgcataatgcatcatgcaaccatttttcactgcataacaggttatgcatacacttttatagctgcataacagattatacagtcgtttttcagtgccaatgaagaaaaaaatgacggcatgatgcattatgcatccattttcatgactgcgtaacaagttatgcggccatttctctagttgcatatcttattatacagttacacattacacttatagtttcaaaaaaaagtccaattttgttttccaacaacaaaccatttattcttgaacataatacacaagttacaaatataataaagcctactgactaacaataatattacaataagcaagggggcataatcttaatctcaaatttatattggcgagttaaaaaatccatccatctttgtttcgttgctaatcccagcaaagtttaacataaaactcatgaagattttcatttcacaatcaattttttcagccccatgatcagcaaataagactcacctttcatactaaactggcggattcctcgaccgttcttatcacctcttgttgccttttgacctctcccagcttcaccgccagcacctccaccattatctacacccccacctctactacccccaccagcaccaccgccactgtcaaaatggctgtataacttagtaaagaaatatatatttatttatcacggttatgtagccgcataactagttatgcatttaatttggtatgcataacatgttatgcaccctttaaagatggatacataacctgttatgcgccttttcagtttgttgcataacaagttatgtagatactttaatctgcataacaggttatgcaccctttaaagatggatgtataagttgttatacaccctttcagtttattgcataacctgttcaccatcaatacatgataaataaaaatgaacaaaaaaaaagatcaaacactcatctcgccgaagtgaagcatcaactagcatactcaagcaagacaacagcagttgaaccaaacactaattaatcaccagcttgaacaatctgaagatagccaacataacatcaataacagacgaaatcaatatgagcaagcacctctgtccgaccactaaaccaaaactcagaaagaatattccaacctgcgcattataaatacatttcactaatcaccaataaaacatattagcagccataaaagtccataaagagtttaacaggtggatgactcacttacgatgaggttatgagtttttggcgcatagttttcaaatttctcttatgtggaggaacatacttgcccaggctataaactaattaaccagcaacttctaacaacactgttttcgtaagaaaaaactgaaattacaactagtaaaattacatggtcagcgtcgacacaattacattaagcattcaataaaagaaagtttacacatgagcggtaacacaccacattaaagtgaccattagatcatacattcaagtgtgtagtcaattatgtaggagaatgataaataactcgccttatcatatgctcctgtctatcataatgagttttgcaatgtacaggttccaagcacaggttatagaaattaaattttaagaacttacaaacaagaattcaactcatcggtttatagtttataccatcgaccttttattgtttagtcgtgatttgtttattgcccgatttacgatgattagcgcaaaaacaagttcagctcaaatgctcaagaatgtatactgacccgctcgaccatctttcttcttcgaccttaaagtataccagcctaaacaggcaccatttttttaagagcatttatatgaatagtaaaataaaaaaaaaacaagaatctaatagtagtgtcagaaaaatccattgcgaaataggcaaaccatctataggataggtacaagtggtcaatccatattgaacacatgcattcaactcattccttttcttgtttcgtacagtagccagaactcttttcgattgtgatcctttgactattacaagttgtcaattaacaagatcacatgaacttgctttttctttttttgatttagactatgacttaccaactaatgcactagatgtacaaagagtcatactcttttaagcaaaattgcagaatcacaaactcaatatccgcaagagtttcatctcagtaaagctaatattacagtaacagacagcccttgtatagtaatatcattttatggtctaattaactaattcacatcacgaatttgaagggccaaaagcacacataataggagtactactgcataaaaacatattcaacttaaaccacaccaaattaaaaagaaaaatccacaaatcccactcaaaagcttaaatttgtgaaatttcacaaacttacttatacnttgacatcaaattaaagaccaattagtataaaatgcttcttaataagtactaaatcagaaatttacctaatatttatttaaactaagaanttaaaaccaatatcaaagcttgaaaaaagaaaactaaaataccttttcgttttccattttagaaggttaggactccttctccgcctgctccatgattaggccccggcaacgaaaaccaactacagaattggattcacttaattaatgattgttgaacattttctctgtcaatttataaaagaatttcgaataccttaacagatcgcataaaaaaaaaaccttaaaaaaaagttaaaattgaaaaacaccaaaaccaaatcgataacagaaaggaaaaatataacaagatagaaaattattttgaaacgatgaaaaaaaatttagaaagatctgatctctcggttactgatcttcagataaccctacaatattatcttgactctctcactctctgaaaaaattgtacgaggaaaaaaactaaaaagagaagagtaatcgggaaggtcagtttggggaaccagaaaagcaaaaactattttttcctaaactaaatctctgaataatgggagtggccgtagttttcacttttacttttagaaattttggggtgggcttcagcctgggtaagcaacctctaataccgtccctgtccaacggcctccatcaacttctcaaaattgggattagagcagtggaaatgggtccatttctctttatctctacccgatgcatttctcggtgcttaagcgaaatctatctagcattttgttgatgtgaacaaataaatacaaatgttagattttattgaatatcttattcacccactagatatttagatatgacattgtgcttcaagatagtccattataggtactagagattgcctcgttgcctaaatatttttatttttttttatcgccgaccaaatcttttttttttttaatcggtaacgacgaagaaaatacatgtttaacaaatatatatccaagcgaaatagtaaggttaatttcatccccttaattccgcacaaaagtgagaaaatgtgtgttcttccatctgatcaccgtaaacgatatccacaaggcatttgttgcagaaatataattttcatcgtggttcatctggaatccaccaatttatctattcctcttgtatgcaagataaccgcaagatactgggcttttgcaacactctacttctgtcctattgtgtaaagtgtcagttgagtatttgtaaagatttgttgtgcggatttgattgagatttagtgaagaaaaggagatctgatttgctttgattgtgtataaagatatgattttaactttattattaacatgaactgaagtgattttgatctataatttgattttgatgctagatcctgtttaagttgtgttggatgcttgtctaagtaatttggttttcgattttttttaattctgtaaatacatggttcttgcggaggtaaaggtagtggtagtggtggtaggatcttcaatctgaatgcagaggtagtaatatttgaaaatagtactaaattactaatcgagatcttcactttatttattttctatgatcaacaaccgattcttactaggtgaatttttcaccgttcttctatcactaactgtcagttatcatatttccatcttatcataaattcaatcttatgtttgtttctaggaactttaggtatggagatatggcctatagaaagtactaaaaagcagttgcttgtgtggatttgattgagatttggtgaagaaaaggattaactttattattaacatgaactgaagtagtggttctcgttcctcagtcgctacattagcttgggaaaataccttagatcgtacaccatttgcccacgtcctcctgctcatgtaggcatggacccaatctaataccttagatcgtaccaagttctgcaacaagaaagatatagaaagtgagaagaacaacaaaaatcagtcctaatcacctaaacaacaaccaaacttcaccatatttcgttgttgttagattatcttgcaacttagaccggcaggttagatcgtagacatcatcaggttaaaactggtagggtaagcagtggttgctcagacccttcgttgaaaaaacactagtcatttattcattagacatcgagtgaaatatagatataagtaaggcatatccacttgagagaaacaaagagacctgaaagattgatatatgatctgaagatctgacaagaaagttcatcaaatatagagttcatggagacaccaatacttatcaagctaggcaatggtttgtcaataccaagtgttcaggaattggctaaactcacgcttgcagaaattccatctcgatacacatgcaccggtgaaagcccgttgaataatattggtgcgtctgtaacagatgatgaaacagttcctgtcatcgatttgcaaaatttactatctccagaacccgtagttggaaagttagaattggataagcttcattctgcttgcaaagaatggggtttctttcaggtatacaaattttgattatacgtagttgattgacgactatttagtgttttactagttcatgctaatctgctttatgtttcagctggttaaccatggagtcgacgctttactgatggacaatataaaatcagaaattaaaggtttctttaaccttccaatgaatgagaaaactaaatacggacagcaagatggagattttgaaggatttggacaaccctatattgaatcggaggaccaaagacttgattggactgaagtgtttagcatgttaagtcttcctctccatttaaggaagcctcatttgtttccagaactcctctgcctttcaggttattgtttctctccgtttgctttttctcaatgccgcacgtgatattttttttttttaatgttattttggttggttcagaatagtttcatcaatatcgtctaggttgctaggataaaccatggaaaatcctgtctaggttgcctaaaattcacattcggaggcagtatcaagcaatccgggtttgtgaattgcatggtttccaaaatatatcgaatccaaacatcatgcatccctaaaatctgtcagatggaaaatatactgaagttgcatttgatccctaatttacatcctttatgcagggagacactggaatcctacctatcaaaaatgaaaaaactatcaacggttgtctttgagatgttggaaaaatctctacaattagttgagattaaaggtatgacagacttatttgaagatgggttgcaaacaatgaggatgaactattatcctccttgtcctcgaccagagcttgtacttggtcttacgtcacactcggattttagcggtttgacaattctccttcaacttaatgaagttgaaggattacaaataagaaaagaagagaggtggatttcaatcaaacctctacctgatgcgttcatagtgaatgttggagacattttggaggtatttaggctaagggcatatatggcctgcctactggtccttgttgtgagtacctgttttgactgtaccccgaaaagttgcttagttacttaatgtttcccttttacagataatgactaatgggatttaccgtagcgtcgagcaccgggcagtagtaaactcaacaaaggagaggctctcaatcgcgacatttcatgactctaaactagagtcagaaataggcccaatttcgagcttggtcacaccagagacacctgctttgttcaaaagaggtaggtatgaggatattttgaaggaaaatctttcaaggaagcttgatggaaaatcatttctcgactacatgaggatgtgagaaagtgtgaacatatattatactccacattgtgtttaatatatgatgaaataagttgcttttgaagtatgatgaaataagttggttttgaagaattcatattgtgcttaaatttcgtggatgactgagagatttattatgtaataataatgtattggtttgaagattctcgtctcactatatgtaagactctgtttgggtcaagtgatgtaatcacggttgaaataagttgcttttgaagaattcatatggtgcttaatattatgtaataaataatgtattggattgaagattgtcttctcattttctgttaagtctctgttaggctagggtacgttggttggtttctcatgctacttgttgtgtttatcgctctaatcttgatcccattgcttctaaaacagctactaaaggaaggcttggtggtggtgcttagaggtgtaaattgggttgtaccagcaccagcacaatctagcacaacacgctaaaatctgaggccatatcagcacgtgatttagtccagcacgacccaacatgttaatttcgtgggttgtgctggcttaacctaattggcacagtagcacagtacacgacactgtctggattttgagttgtcgactaaattaaagattcatacagaaagaattttcatttcgtctcaactttatgatacttttgcgtgtataatttcggtaatgatattctccactcttctcgcagttctattctcctctcgcgctgatgcggcgagtccaccgtgtacaagtgacaaaactttactaaaaaaataaaaataaaaaactcaaggttcacatgactcattttttttttttccagcaaaacatatcggcttctgttccccttatctcttctctattttcagttaagttataaaggaaaaaaaatatctgaacacgaattttttcatcatttcagtgaaacatttatgtagttgcggaaaatcccacaactagacccttgtattgataataacattaagtctaagtcattttgatcaactcaaacattaatgatattattcagcactttgacacttatatgatcttctcaatctcttgataatgaatatgtattgttcttactgtagattcaaggtagatttcacatacaacaattgaggaatacaagatgaaagccaaatttaaagatgaaattcatttttttatttcttataattttcttagctatctctctcttaatcgacccctctctttctgttagatttctaagtccttatacaggcaaacttatcaatagaagacaatcatgattcacgtccaagatctcagttgactgattctatttcagtttgtcttatgcgccagacttttgagaaggtatgaatgtgcatcgtgttgtctgttgtatctttcatggtactcctttgaatatggtctccgtgctatctttatcacttgattatcttctcgcaatcttgtcttattgtcgcgcgactattcttcgccctgtcttctaattattataatatcttcgtgcttggagttgttttatctagagcgaagttgtgtgttcgccttgtgcaatatttagaccctacattttgcttcttgtcgcgttgttcttatgcaagtagaataatgcgagaattcttggtcaaacttcgcatcagtcctttcttttcatcttctttgtattacccgacacacttatgtattttccgcgtaactgctacacgtgttgaaagtttttccttttcaagcgacacgtctttacttctttttatcggataaatactcaggagagagaaaaaaatattttattttctaccgtcttcctcctctgttcaacttcttcttcttccgtactttgtcttcttcctccgtgttcttcaacttcgcctatgtttccatggcagatcaaaatacgtctgctcccactgttgtttttgctacatcatcttatcggtgagttaattttgcctcagttatttgcattttgcgtttcttacgacatgactataatttctgtgatttttccttttccattgttatcgtattccaagctttgttatgttattcaatttcagtattccaatgtttattcccatactaatcatgcagttcgaaaccaaaatccggtaagaagaccgcagaaagttttgaaacttttcaagtagaacttaaaaagagtggtttcattctctcagttccagaggattcttctgccactaccctgttagacgaggagaggattcaaagagaaccatggagcgcgactcgcatgcctatcgcgcttggacaattaaaggagggtcttcgatccttttccactttttgatccagaaattattagagcactgctcagtcaaacttgcaatcgttgttatctcaagcttttttgtcaagtttagtgatcaaaactataagtcttgatttctagtctacttatagctatgtctcggactaggatagaatgtgtagttgatctttagaattcacgggattcatcaattgaagacgaataactactaaggggagcttgtggaacttcatcaacaaaaggtatgtggagactgaaactaatatatcactcaaaaagtctgtttctactgtatctcctatttgagacaaaagtcgtatagctatataatattcgatttatacacatttgatatttcgagctgagtttaactcgcttacatatttctcgaaatatatgttggtaagctttcactttaaccaagttcattttatattcttgacgaaagtcaaagatgatctgtgaaagccatctggtaacatcttatatgatttgtatgagacagtcatttgatgtagactcggaatgtttcgtattgatcattcgatcacttgaaaatttctttgaagctaatagtctgtgtgagatagctattgtcgtcttctaagaatgtttcaatgattgaaatggagtttagaacacttaaccataattggattataaacatagtatgtgtacttgcatatatgtggatccaagaccggtgtggtatgcatacacgtatgtgtactggcaaggtcaggtaaantccgggatctagagtatgcttacatgtacacgtactggcgaagtcagttgaagtacgggtactatagtatgcgtacctgtatgcgtactgggttcaactgaagtttggatgtgtgacagtatgcatacccgtttgcgtactatcgaacacagtccaagtccggctacttaggttggcgtacccgtttgcctacttgagcgggttatgttctaaaattggttgtgccatgaactaatacatttatataataaggaatgcaatctcttgcaaaccgtggctataatgttcatgaattgattcgagttaattaaaccaattttgcttcaattgtgtcttgtatacgtctatgagaatataaacaattgaacaactctataactagtttcatttgagtcatatgaactagttttggttaagatgaattagattgatatgaaagtgttcatatggctaacttcagttaactattgttgagccaacttggtttacatgtttaggtacggttacccatatctaactgaaggtacattttatttgtgtgtaacaagctaagttcgatctaaaagttgaaagatattagcatgaatctaatcaggagttcatctaacggtgaatattgtttgctttgttccaaagctatcaaaccctgatttgaagactatataagggagaactctagcaactgggaaacctaatccacacacctcttgtgtgatactagttgcgactagagtcgattctccttcaaccttaggtttattccaaaaccctgttggttaacgacttaaagacttcattgggattgtgaagccagacccagctatttttttttgtagttgcgtgttctaatcttactttatactatcgtgattgagtactatcttctctaagattttctcgagatttatctccaatgggtaagattaaaataagtcacgaacatcttcgtctcatcgtttatgattccacaatatcttgtttctcttccatacgattaacattattgtgagatgattgataatacttggatgtttttcgggaatataagtctggtttatcaattggttcatgtgcaccttgatttatcataagacgaaacaaaactcataggtatttctgtgggagacagatttgtttatcaagtctttgactttgggtcgtagcaactcttagttgtaggtgatatcagctaagggaatcaagtgcgtagaatccttctgggatttagagacgtaaggagcgcaactgtaccttgatcagtgtgagattggttagggatcaactacattccagtctgaagttcattggtagtaggctagtgtctgtagcggcttaatacaatgtggtgttctaagctggactaggtcccggggtttttctgcatttgcggttttctctttaacaaaattctggtgtctgtattatttcttttccgcattatattctctatataattgaaatatcacaggttgtgcgtaagttcaatcaatttcttgaatacggcctttgggttgttgattgacttgattgacacttggatattggtttgtgataccgtccaagttatttctcttattcaatcgggctcgcaaattcctatttgtttgattgtagattgatttgagaaatttagatataactctttgatatacttttccaaagattgagtctggctgtctagttgattctcttgaaagtatattggagttagtccattcagattgacgaagcgaaatatttggtgtggttgttagatccccgctttttcaattggtatcagagcaggaaaacatgtttaagacctcataagtaagaggaatcacagggaaataatagaataaatcaggtaagaggaaaagatgaataaatcacataaaaaagaagaacacagatgcatgaaacatatataatactcatacttgacattacataatagaaaaccacagattacgcacaaagcatgaatttatttttcgctcgattgacaaagcacgcaatcaaactaaccaaacaacacgtaattatacaggtcgtaatgcaaattttgtgttcacagatttcacttttgtgttcaaaatccaaactaaatttgggtacgaagcctatgctagccagttaagcattgacttataagtttacggttccaagtctaccacgtaaaacaatcaatcacacaaagatatcacaagaatcaattacgttcacatcatcagtttttccgttaagcttatatagacccaaagtcctataactcttgcttaaaaaatcactgcctagttacaacaagttttccagattcaattaagatcttaaatatttttccatctacaacagaacaagatacaagattttcgcatatgctcggaacatgaaaacttcattcaatgtgagaatattacagatatgagcttctgctcgaccttttccttttatgcaacctctattgtatataagttactcaataagagtttctcgacatcccctatcctatgataggaggtgaacaggtctctgtttcaacaaacattcttggtggctccagagtccacctactggtctctcacattggttattaaaataacttccgacatcacgccaccaaactcgttctagtttgtttcaactaaattagcattaactttcttcttattaaggtttttatgttgtctacaatttactgccgcgtggccaggaattttacaaacataacactcacccttaactaaagtaattctggattcaggtttacgaaatatacctttatcatgaagaccatgcttatagttgcgttcgatgttctcacctttgccatctttggaagatttgtttccaaccacatgcggctattagccatgtccctcggagatgacacctttattaacaaatcacaattccaaatcagaaagtataatatgagttttgaagataacatctatatatacaaacttcgtttgaatcagcgtttcaaaaaactcatggttaccctcacaaaaattaatttagttaacaacaattttctgctcgtcagaatttttcagaaacgtttttctgttttgtaaaatatcaaacaaatacttgtacaactccaaaaattctgaaattttatgcgggtaactatcaggatgtctactacgttgtgtaaaaagggttcatcgaaattccttctatattaaaagataaaattgaaactctacatctgaccagaaattcgtttttgtttttcactccacaattaacatccatgattcacaaaccaatcaatcgttttcgattattacaaatactaatgtcttaagattgttgggtgcaataatcaaaaacaaagaaaaatcaaataaacaaaagttattgatacttagctcctttataatggaagtgattgctttgacgaaacgaacaagctccccgtatctccgcaacagcaacaaggcaaaactttggaaaatagagtgagtcacgtgttcaacacgctgcccttaagacattagcgcccggctacactcaagagtgatgctatagccctcacaggacggatatctccaggataaaacaccctaatacacctactactagcatatgtagtagatgctcaacttgagcttggcaactccgaaaaaaccgttaaggaaaatcgcgaatgcttaaaaaccgctataaaatattttcccttaggggtcgctctaaaatatagagcaacccctttcccatagattttacaaaagtagtgaatttctttatataattgacaaatacaacttaagaagaaaaactccccgatgtgggactaaaagctttatatagtttcttaaaactactaaaaattggaaactccacgatgtgggactaaaaagtttcattcacaaaataaaacaataaattataattttttattaaaactttaaaaaatcatttttttattaatcgttttccaacatcaataataaatgcacgatcgcggcaatttaatttactcaaataagactagggttacgagaacgagacagagaactaatttacatgtacctccatatgatcaccagtgttaaccatgatagagttggaaccgcatccaaagcaacctatttccccatgttcttaatttgcaatccaccaacgtcattttgtatgagtagggttgagagaccacgatcagcatgtgggagcaaatcaactgcaagatcaggctgtgggcaaggaggatagatatttgcagaaaacttttgaacaacagaatttagttcaagggacttttcgatgtcctcttctctaattctagtccctccataattgctctgagcagttttttcattatttctcttgatcttttgctgtactcacttaaaacctcactgtatgaacaaaacaaaatttagccaggcgcatttacaaactcgaacaagtctaattgagtatacacgtttaagaacattggaggtttacctcataccctcgggtttaagaggggaattaaacactggatgcactaagaccctaagataatccctcccaaaggagacactctcagaggtagggttaaaattggttccacatataattgggtccaaaatgcatgggtctgaagcattctctccgttgtaaaccgacttttcttccggacttaagtcaaaaaaattcatacaggagttgatcaattcctctttcaaactctttagaactccatgcttaaccatctataattgtcacccgagcaaactcataataaataaactacttcaatatgcatgtaactagtgcaaaaatcattataattcaaattctattcataaataagttattaccatgaagaattcccaatgcagacatgcattttgaagctcttcgatgatcttagaccgtttaggtgaaccggaagtgaggagcgagaaatcactgacgggtagagtaacttggtccacagcttcttcaactgacatagtgagatcctcggctattgactgtttgccaggaacagatatgagatcagttgattcaatcaagtcttttatcatattacccattttcagaaaaatactattctccagtgtagttgcggaaaatcccacaactacaccttaagaaatgataagacactaaatctaagtcatgcaagtaaactcaaacattaatgatattattcaccccttgacactagatatgatgtttacacaagctttgtatggagtgaagtgatgttcttattgatatcatgaagatttatacatataaggaagatgatgataataagataactctagtgtttattatcttttttctagtggtgattttctactattgttctagactgaattcttttcaatctgcctctctcttcattatttgaacccatatatagtcggtcatcatggtagaagacaattgagttcacatgcaaatctctgtttgctgattcctgctcactctgtcttattccccaggcattgggaagatgtcactatatctcgcgttgcggcttcgtgctcttcgtgttgtgcttgtcgtgtgggtgttctcgtgtttgtcccattttattgcgttgtagtccttctcctaatttctctcttcgcttataccagtaattattttagtgagggcgagactatgggttagctctgtgcgatatttcgcccctacattttgcctcttctcgcgttattcttctgcaagtggaataatgcgagaattcttggtaaatcttctttattcaacgtatctccgtggtttccgcatattgattacacatgttgtcaacttccttattttccggcggtgggtctttattgcttcccctatataaataccaggagtggtgaggaacgttttctcatatttttcttcctctttagcttttagagttttatgcgttcttcaaaattcatgtttttgatggttgaatgtggtatatcactttttcggtaaatctttgccttagtactccatgctttgtaattttctcttgctttatcaaattccttatctcaatttggtgattttcttcttttgcaggtctagatcttgttttcatcatgattgggggccttttgcagatgcgtttttgttctttgagcaagacggtatttcctctcagctgtgaaatccccaatttcatcctcgggtcactattcagaaagagttgttcaccgagcctgtcggtaggatcactcttcaaaaagagctatccaccgattctgttggaaggatctaactcattgtgattttcgccttgagcttggagtctctagtcactcttcggaataactgaaccgtcgggtctatggggaggatttattttgttgctcgcgtcttagtttggagtcgcctcgcgatgctgatcctaattactccagtgatattgatcccagttactccccgggtttgatgcgtggatggtgatatgacttcgcagatggagaccttaatcgcgtgctttacgtgtcttgtctatatgtttcagtcgctttctgtattctaatcttataaacgagcatgcatctgaataatctaaataataaattaatattttgattgaatttttaagctatgtttgtttcgtgcttgtgcgaaaatatggtttgagtatcttccaaggaggtgggaagcatttctcacctatcttccatcgctttctatttccttggaagattcttaaatttagtatgcaaatggaatttttttttatcagcttatgcttttaagattgtcaggcatagatatgcgagtatgcgaatgcgaagatgatatagactctgcgacttcgtatattgacatctgtataaaataagtttttatgatgcgaaccttgtgtgcgtgaattatggttgtgctcctaagtcatgctttggttattataatatttaaatctgagagttgggtatacttagctcgataggagtgtgtttctttccttcctcagtgtatcctttttgttcctcaatgtccacttgcgctccttagattgcttgtcttcgtgtgatatttataggtcttaatcgcctcccatgtaaggtcttactgccttccccgcatagaactttaaaggacttatggtcaccttgggtagggtcttccacctgttgggcgacgagatctcagttccatgtgctcttgcgagtcattggccatcgttcttgccttatcaatgttagtattcttacctcctcgggctattctgcgacaatgtaccaggcctaggtactcccttgaatagaaagccccaataaattgtcgtctttgacacaataagcttcctaatggagggtgtcgtccatttatattccccctgaatcgccacttcaaggagggcactcctaaccatatcagttgggctccacccatccggtgatacaacgaccagtgttgtcgcaacctcatgcttttagcctatgtggcttattagacacaagatcacaccctaggtggggtttcgttggaccgagtgtatcacaagttccaggccatcttctatctccgctgacatgcttttacaccccataccagagaatttattcgctgagtggttcgtcagtggcctccgatggatagccattttgccgcaatataagtaactttcctgggatcagcaactatgacacgcgttagggcttaagggtcgcctcttacacactgtgcagtcctccagtcgcacagttttgtgcgaactaagttgacacgccataactgtagtcccagcctccctaggtagaggttttaataatatctcgcagccccctattgaggtcttacgagtaatctttgcagcttcgctgtgtaactattgatttcgcgtttggcctgcttgttttcttgtcaaaagaacttgtttcatatctcctgggaacatatgttgagtacgttaataaaatgcataacttactcttcatggataatatttcttgatataggtgctattccatggatgtgtgagtgtatgttcttcgtctttgtctgttagctcataggatccattcccaacggtgctcttcacgatataaggaccttcccagtttttcgcgagttttcctcctgattctctttggtatggtgggattttacgcagcactaattcccccaccttgaagttccttggttttacttttttgttgtattcccgttatagttttatgtggtaattgatcatgtgctgcagcgcgatttctcaattttcttctgcgtcatagagttttgccaatatgagatctgtatttaaattcttctcccaagcttcgcgcttagtggttggtatgataacttatattggtagcacagcctctacaccatatgttagacagaagggagatattccagtagcttcccgtcgtgtcgtattgtaggcccatagagtgttatggagatgttcacaccatcctttgtgatgaccatcaagttttttcttgataatgtcttccagggtcttattagtttcctctgcttgaccattgttgtgggggtatagtggagtagattttccactctggattttgaatgcattgagtagcatagcgatgttctgtccttcgaattgctttccattggatgataccaattgtactggtatcccgaatctgcatatgatttgttcgaatctgaaaaacaagacgtcggagtccctgatatgttttgttgcccttgcttcaaccactttgtgaattagtcagttgctacaatcaagaatcttcgttatttacagcccggtacgagaggtcccactatatctaggacccacttcgcgaagggccaaacacttaacacggaattcaaggttcttcctggtgcgtggatgcttttcccgtatctttggcactcttcgcatttagttgctatatactttgcatcttcgtgcatgtgcggccaatagtaaccttgccctctagttttgaaagccaaagatattgtcccgctgtgattcccagcgtccccatagtgtatagctttcataatctcaatgccttcttccggtgattagcatcttaaaagcggcccttggaaagatcttctgtataacactctgtcgcgtagttcatagtttgtagctttgcttttgagtttatgtgcctccaacctatcgcggggtgtctttccatcttgtagatatttttgtatttggatcctcgagtcgtatttttcaatgcttccatcgtcattttctacacttataacctctgcagcgcatcctcgaatgtcgattgatggtttcctcaaactgtcgatgcgaatgaatcttgtttaagggttcaccatcattgaagtgacgaaggagagagcatctgcatgttgattgtttatccgacctatgtgtctccatataacacttggaatacggtcagtgtattgtttcgctagttgtgaatatctttgtagtgagtgatcgttgattttgtatcgcccatccaactggcgaatgactagatgtcaataactagtaagcctgatgtcctccaatcccatttcgacttccaatctcaatccgtgtatgacagcttcgtattcagcctcattgttcgtagtttcaaactccaaactgaaacagtagactattctttccccggctggtgagacaaagaaaatttctatcccatttacctgactgttcactgatccatccacaaatattttccatctttttgggtaatctgccttgagtaggtcttccggaccaggacgttcttcgtcaacatccatcatttcactcaatgatcatcttcttctaggggaaattccactataaaatatgttattacttgagactttggtgaggataaaacttcgtaactcaacccaaactgttcgatctgtgaattccacctctcgattcttcccactcttttggaggattttaacactgactcaatgggtgttttagtgattactttgactttgtgcgcgtggaagtaaattcggagtttctgagtcgcataaactaacatgaggagaagtttttctatctttgtgtaatttcgctcgacatagttgaaagttttgctgatgtagtagattggtttctccacaccttggtctgatcatagcagcacaacgctgagtacataaggtgtggtagctaggtatatcagcagttcctcgcctagctcaggtttttgtagcattgatagatttgccaagttttcttttatgctttgcaaaacggcttcacacttctgtgtccatgcgaatttacttcatttcttcaagatgttaaataaattcttgcacttatcagacgaccgggatacgaatcttcctaacgatgtgaccaggctatttaatttttgtacatctttgatggtggcgggtgagggcatttcgcgtatagcttgtactttgattggatcgacccgaattccttccttggagatgatatatcccaagaattttcctgatgcgactccgaagatgcatttcgccggatttatcttcattttaatttttcgcatttgttcgaatatttctcccagatcctttacgtgatcaacaatttttttgctttttaacagcatgtcgtcaacgtagactgctagggtgtgggtatccatggtttaaacacttcttccaccattcgttggtatgtggccccagcgtttcgcaatccaaatggcattcggttgtaacagtataggcctcttggtgcgaagaatgtcgtattctcctggtcttcttccgctaatggtatctgattataccctgaatagccttccattaatgataccctttcgtatccggtaacatattctacggtctgggggatatctggcagtggatagctgtcctttgggcgtgctttatttaaatcggtgaaatcgatacaaatgcgaatatttttgttctttttaggaactattaccatatttgcgacccattcggcgtattatgctctcctaataattccctcgtcaaccattttctgtagctcgatctcgatctgctcgtgatacatcattgatatcgttcgaatcctttgtcttaccagctttgcagctggattaatagctaacttgtggaagtaaagagaaggatttatgccatgcatctcatccatattccatgcgaagatatcttggtagtcattgagtaattgtatgaggtctttctcttcttcttcttcttccatcgtggttcctatctttatcattttaggttcatcttttgttcttagattgatgtcttttgaaggttcttcatctgtgaaatttggtgtaggatccccttgtggcgttggctctcttatctgatgtattgggtctccttatttttcgggtatctcaccggggattccttttcattcagctgcttttaccatgtaggcttggaattctctctcttgtttaacttctctcgcccttttcttcttatctttttttctttgttttcgcccttcttaatgttgcaagttcaaatctttatattccttcgcctgcatgatatcttccttgatttctccaatctcatctggtacggggaagcgaatgcactggtggaaggtggatgcgattcctctcactccatgtatccagggcctccctataattgcattataaggggtatccacttccacgacactgaatgtcactattgtttcactagtggaaaatgggtgttttaccacccacatcagagaccctcattgactgtagttggaccgttgaccaaaaatagccgtttgtgatataaaaaaaaccgtaaaaattcagagaggattaatagcagtctctgaataattagtcttttgccctaaaactgctaccgatcccgcgacccatgaaaaccgatttagatgtgataattttttattatttgatagagcatataaatacctatttctctctcccatttctctttcttcttctgctctcggtctcctcctcgcctctcttatccatcttcttcaccacccaagcgaaactgaaaaaagaaaaactcagaagaaatcaattaaatcatttctctgaaacccaacccctttccccgtcttcagtaaaccttagatgttaaaatccctcaactcattggtcaagttataaatatcaaatctgttgggaacagattcaatcgaagttttttttgttttcattctagggtttctctaactatatctaaataaaatcttatgaatcattactgctacaacttttgcttttctagggtttgagaatctggagccgttctttgaagatttagattgattggagtctagtcttcaattcaattgaagatgaatattttgatctaaattaattgaaaatcctcaggtataatttctccctcatttttacttgattcgattcaattttcggttaacgaagttattagatccaaattttcttttataaaatttagggtttctgcttagatttggaatgaaattagggatttgatttggtttttttttagggtaaattgtgtttgtagaaattttcattcatttttcttttgatttggtatcaaaattctttgggtcgtgtctagttttctgtaaacgaagccatttaattagtgtttgattttcttcaaactgtatcaggtgatgttaggatttgcaatttttttcctccaatttcactatttaagttagggaccttagggtttgattcgttggataaggagtttgttgtttaattaatggtggatttgtttttaatttgcagagggattatattgacttctaccgatggatatcaatttatatgtagagattttggtgggttttatcttagctacagaggctgtaaggtattgacttctaaatatattaatagggtctcacagatcgatgggtttttatctcgatataacttattttgtaaagattttgctattttgtgtatgttacttatgttttattgtggtttcaaatcatggctcatttttaatttcagtttagtttatggtttagtttgtttaaaggtagaagtagtttgctttattactggtctttggaagttttttgaagcttggtctttagaagcttgtttgattgtgttttgttgctctgtgaatggtcgtatgagtctccattgtaaatcttccattgggtctgtcttaatgaaagtgaaggactttatcttgaaaatattagaaggttgagactcatggtttcaaagtgttggttagtgttcttccattgggtctgtcttaagattaggaagtcgtgttggtttcaaagattagtaagtgggaatctccagcaagttattgagttaaaagtgttggttagtgttctagtatctacgtgtttgtgtgaaaaatcttttaacattttttttgtatgctgaagcatttgtctcatctctctttgcaggtaattgaaagaaaatctgagttggttaggataggagatcatgtttgaactattgtatgaagaagcttaggacatggtatgctagcaatcatattttcataataattctaggggtttaatctcttatggatattttcctcaccttattttttatttcaatccaggatgatgttgttggatgttttgaatattatgcagaacttgttggaggctagatgcaaaacacaaggttcctgtcaacattccaatggagaaatttaagaaccatgttcgttgggaacccattggaatcgataagaagctggtataagatttcaatttgactttttgttataattttggtacttcaagaagttgtagttttgtggatgctgattaagtttgttgtttactttttccttgtgtaggtcatgaaggaaaggttataactgttgaattcatacctgatcgcaaacaacttgctagtggttctggtgatatgatggtgtgtttatggatattactattcaaacccccaaaatgcacttgtaggttagggttttttcaaaagctatatctactgcattgatttcgttaataatgaattaatttataatttttgtttctctttttcaaattttcacagatcctgactcggtgtctctgaaatccgaagaaaaggttggggaaatattcttatggaatgttaagttaacaaacctaagtgaagttatctagtaataacacaatgtgatgtttttttatttagattttttgataaaaaacgagctttttattttcttttccaactaagcattagctttctgacgtttgatgttgttcaagtatagaagaatgtacagaacacttcttgtcccatgatttagaatgatgatttagctagaaattacagggtaacctaagatactttcaacctaactttcaaattttgagtaacttttctcattattcagtagcaggatatttagctaggtcatattaggtttatactgtgtagttctgttaatcatacagctttctctacgagtgtattcgtagtataggttgtcatgggcatatggcgccgcgtggcgttgggtgtaaaatcccgagtcgcagcgagacgtggcgaagccgcgacgtagaacaatgattcccacataggtttatgttcttgacataacaaataattagcttaggatttcctgtattagattctaaatcttaatgaaaaagatttgcaaaatgtttgaaaagatttttttccttcactattgttaaattataacaaggaatgatctgtttcttaacataattagcttgggttttaaaatattaatgtatgacttaatgaaaaagattttcaaaaaattttggctatatttttttttccttttttggaataaaatgccccttttgcgcccaaaaaactggcgccttggcctgaacgcctagaaaggcgatgcctgggcgccactttttacagtggcatctcattacccactgcgtggcccccaagttcagaataaggccactttggcgctaggcgccaacatagttcgtagtttgttatgcattagtgaaaaatggatcttccaatgtttatgtatagtgactctaactctatagtgattctcgatgcaggtacggtaggcgcatgagtacaactaatgctgctctagatagtgacactgtagtgtagtgtgtagctttctaggtacgtatactttacttctttcataaagatgaactcagcaactttcagtggtattctgatccttgggtccggttacaagtgtttgtagttacacctactgcatatattaatgttatctgtatattaccttgagttgatgtagtctccttggacaagttccgcgacaatgtcttatgatatatgctcatattgttgctttgagttccctttgtagggataggatatttatgaaattacaagactgtatatttggattccctgagtttgacataaatctatgtgtactaatattagtgtggtaacaggcaagagggttaaagaagaatttgaagaggctcaatgcgcttaatcattggatgcttgtcaagcttgatggtacctttgtaagaatcaatagtccctttcttgtgtattgatatattcagttttggattttggttttaatggaagatttttatcttcgtaagctccattcagtgtgtcaagatacgagtgatacaaacaccactatttgtatctggcataaacatatttctgcaagttttgtttggaaccaggttactggctgtcattggtggttcctctgctgatactgtacctatcctttgcattatcagagactcatctctacaacgaatcaatgaacctcatgaagtaagttttgcagacaaactttgattatctctccacctctttccatttatgcttcttaactttgacgattcaactagttttatgcacatgtattctctacttgcagagatttttacacagtatgatggaaactcaaggagtcctgattgtagctgcaagcttgtagatcatactgggatttagtctcgttgtacacatttaattcgtatctaaagattgtgttggcatataatctaattgtatcttacttagttcttcgtgattgaatcacgggtttttgttagaatttactagctatcttggacatgtattctctgaactcagtatttcatccttttttgtgtaattttacactcaatggttaaaatgaatgaatgttaaaattatcagtttgattataaatttcatttaaatttgaacttgaatatcagttaagtttgagtttcatttgaatttcagttaaatttgaggttgcatttgaatttcagtttgacattaatttgacttcactgtagtttaacttgacttgactgtttgacttaacttgaattgactgtttgactaaaatgcagtaagattaattcagattcagccattcagacatttcagctgatccaaatctgattttttttttatattataattcaaatatatgaccagtatccatggtcagcttatagtgactttaggaaacggtctctattcagagacccacgcaataagagtcgtgcaattaaaaaacgctttataaacgacccattcagaaaaccatagaacaggtcgtttaactcgtatatatgacgtgtcctggcggtcgcggaattgttgttttccactagtgtttccaatgtatctattggtatcgtcagtgtgatctctccccttggtcttgtcgctattccgttgaagtcgaatatatcatattccgccggtgcaaggtttatgtcatcatatcccatcgccttgaacgtatggtagaataacacatctacagagcttccactgtctaccaaaatcctatcaactgacaggtgtggtatcgcattgtccatatctcgacagtctgatttcattattaaggtcacgaccaggttttcctcgtgtggtgttccttccttcggggaatcctctgcacagaatactatcggttgcttctgccactccttcaagggttattcctttcccctcgagtatatttctgctccattgaagtcgcgtttaaagactcgccttagcactttatcgtgaaacgccttaacatcttttgcagttgatattatggcgttgcactgttgatgttcgtcattattccttcttatgcatacttggtgccgatttgctcttcccctatcctcgcactggttcatttgcgctgatcttctcatattcagtcgtttttgtgcatcgtttcgtatttgttcatcctctgagggtaaaatacccgatgtccacgtgtcaacatcctaaggggtggatccacaataagatgatgatataaaagcatcgaatcatactctgaaaaggtgagttcgtctgaatcgagacgcctgctacaacgtcacatgaatgacgcgtgtaaggagtagtctaatctgctcatacggtcaagtctaaaaaggaggaacgcatttaatgaaggataaggtcaagatctacatcgtgacgggagactcagacgatctatactgcaatccagaagtgatagagcacgaggttctccaaagaagggctacacgatctagaggagagcgatataactcggagggagaaccaagcaagccatcacgagggatagtatagaaccagactgaagcagcgaaggagatatatgatagctccatcagctcggacgaccaagcctccacgagtctgatttccctataagtaccagtccatgtagaaggagagggacaaattatgtattattatatggtatttctacagagaattcttgagagatatctagacaaagagagagagtacgaaatataagtgatatttgtagctctttcaagggtaagaccttataatcaataaagaaaacatcttcttccccgtggatgtaagtcttcatggatgaaccatgttatatgcttgtgtcaatatttacttttcatgctctttacatcttgttcatcttgaatcttgtatgttttagtagtttttagtctttaatcttacttgggtgtagtcatcagaaaagatgcaactacatttgacgctagaaacaggaaggtatgaagatttattctacctccctagtaacaactctatattgatttcataatctccatgagagaagtagttttcatactgctgagtagacttctgttaagatgcatgagtagagctcggactcaaatatggtctacacgatctgtggagtctagaagaacctcaaaatcaacagatctacagttttttcgctagttttctttagaattttcgtctagcaacaactttcaataatgtttctcaaggtactcaggggagtttaatatcggagagaaaatggagtttttgatacttcggcactcaggcgatctcctccatgaaagagtcgggaagaggaaagctgatcagcagacttcatggaagaaaatatcttcatgtgaaagtataaaagagctatttgttcttcatccttaaaggaactcaaaataacctacaaatttcttcttagaaacttaactctaagtcaagaaaaagggttaacgagtacataatcattcatcaaacccaaaagtttgtccaagatccaggttaaaagatgatgagaaatatttcctaaaatgggaagatatgctcaaatcgtcataatttggtctcttccctataaaaggtatgacgtaaagaaggaggtatgtttctcgaaaaaaggggaactgataaaacacctttccttcatcattaacgccttgtgcaagtagggaatgttttgacatcttcacatgtctccaaaatttactgcaaagtcttcctgaactaaactgtccattctggactatgacttagtaattacacatgacctgcaaatctagggtcccaattgacctagaactttgtaggtacgttctaagcaaaccttcacgagacttcaactcgtccactagggacacttagtggtttaaaaggcttagtgcatacgctaaatgcattcgagagaccagcgacagtggtataggtaggatttccttagttttgttttacttgaggacaagtaaaattcaggtttgggggtatttgatgagttccaaatattgtatatatttatccctttttgttggcatttaactcatcttttgtgcagtaattctacattttatcccatattctgtattttcattgttttcaagaataaatatttttcttacttaattttgcatttttaggtaataaataaagtctggataacttgcggagcggaaaagagctgaagagtggtgaaaagccggaagaaattacgcaaggaagccgcaaagaatggagcgcacgtccaaaaagctaggaatgggctcaagaaggaagaattgttcttaaagaagatatgggcttggcatacccaaggcccaaaacccttacccaaacccattttctatatccatacccgcctccattctcaaccgttagatcggatccatctcatcatccaatggtcgatccttcgtagagcatcaaaatctgaagtctctgcaaaacaccatagtacctaaattccaagccttcagattagatcacatttagatcctacggtcgcttctttgcctgcgcatcaaatctcgatacttccgctaaacactacagcacctaacctcgatcttcgccgttaacttcgttgtatcaagacatccgacggtcgctaccagattcttcagggatagccatccgattcacctaccagcttcgcatccagtgactcagattctccaacatcgaatcttgatatcccacctaacacccaagtatcgaacacctatacccaaccaaacactccctacatgccaaaacactcgagtcttctcctccctctcaacctctctgtctgcaactaccactccgcctgctctcactgccaccaccaccataccctgccgcaccaccaccctgccatcgccacttcctccactgtcaccaaacaccacctacacgccgtagctacctcccctacctctatagccatctaactcattgatttttcaccactgaaaccctaggtgttaaatcaataaattaggtgaggctataagacgcaattgaagacatggagaggagcagagaagatagaatatgcatgggtcgacatcaattcagggattaggtgagtggacttttcaattcaaaaattagggtttgcaagttagggtttcgaaatttggggatattttgtaaacctataaaaggaaactgatgtgtagagagaagggtgttcttggactagccaagttaccaattaggtttaattttagtttgtaaaattctaatttcaatttcataaacaattagggttctgttaatttagggttcttcatttgctgccactatccaaatttcaattccatactttattgtttaattccatgtttaagttagttttaatttcaaattcagttaatttcaattttcaattttattcttagtgtttgctgttaattgtctgtgttactgttaattttattttgtaaattttgttaatgtttcattgtttaatctatgtcaggatagtttaattagaatgtttcactgtttaatttcactgtaaatgctcttgatttgtgtatgttactatgttatatctgtgatgtttaatgttttgtgtgaatgttaggctaaagcctttgaagcattggattgattgagcagtggggagaaactagtgctcactagtgactgtgagcaaactggttctcttcccactctagttgtatgcctaggctctcaatttgtttttttttataactgttttgtgccttgttctcccacttcccttggctaacagccttggtttatttggttttgtttcctgttaactgccactgttaccatttgtttcattgctgctcccttgccttaggttaactgcctttgtgcctcattgccactgatttttgcttctttcccatgatcattgttagtttgtttcactaccatcttcattgtcattgtaaatgccatccttggccctgtgtgattttgtttcctgtcttcctttgcttctgctgccttgttctccccctgctgctactacttgctgttactgctgctgctgcaactgagcttggctcagctaagaccacagttcaggttaaggcccagccacagttcactgtgaaagcccagctcaacccaaggctcaaatcacatcacaagcccagtctaattcagtccaccaaaggctcagttcactacaataagcccaagcccaaattcaaaaccaaagcctagtgcactacaaaaccaactgagcccaagctcagttcatttcattaagacaacaccccaattcattccaagagtattcaaaggcccaaatcacaatcataacccattggttaccaaaatccattggtacccaaagcccaacaataggaattttagagcccaaaatagctagaaactccaaacacacccagtctctgtggatcaacccgtacttgcacgagctataactgacaaccgtgcacttgcggtattactgtaggcccgtttcatttcacttcaatttttacacacctttccgggcccaccaagtttttggcgccgctgccggggactcgggttgtgtttttcttgttgttttattagctatttttgcatttcactgcatagcatttgcatctgcatctgcttcacttcatttgctgttggacctgctattctgaacctgtttttcctctgctgggacgccaccaaggaaaagaaccaaagcccaactgggtttttgcaacaatatcagagcagctgggatgtgcttaaaaggtaacccatttaagagaacccgaattgtgggcttccaatttttaattgtgggcttgtaatattaaagccaatttttgggctttttattttctgttgggtttgtaattaatttttgtgggcttgtttgtttaatttgtgggcttgtatttaatttttgtgagcttgtttaatttggacttgtattttgtattctgggtttttaaaacccagctgagcttgtaaccgatcacgctaggttaactcgttagtgggccgagtacccaaattctaggccgagattttggactcagtttcaccaaacgttttcaaaccagctgagccaaagcaaacacaaaacaaacagtgggcttgctcccattcaaaaaccaaattttattttcttcttttaaaaaaaaaaaaaaaaaaaaaaaaaaaaaaaacctaaaattttgctcctaatttcaaaaaccaaaacttttctcccattcaaaaaccaaattttacttgctcccattttaacaaccaaattttttcttctttaacccattaaaaccaaaacttgctcccaaaatttaaaaaaaaaaaaaaaaaaaaaaatgtctcccaccaaaaccaaatttttcccaaaaatccaaacccattaaaaaccaaaatttgggctttgtaacgtagttacttagcttttgagccaatcatgtctggatttttgtctgctcctggggatggaaataaaactcttagagaacttgcttatgggcatgtgccacgttatgaaccttccacggaccatgatgtcaatagtcataggaattattatggacattttcaaagtcccgagccgcaatacatgaaccctaatgattattcatacatgcatcattcatcgcaacgtgaaaatgaacattttgctagagcctcactcacacaatcatcacttatggatcaaatagaagctcgaatcacagctttagaaatgcaatcacatgaggaatctgtcacatctaattttcttaggcaacctgaaatctatgcatgtcccgcatgtggtagtttagaccaccctgttgagaattgtcatattttgcataattttaggcaatgtagagaaaatccaaggtatgaaatgcccataaattgtgagaatggtagtcattgggaccataatcaatcctttgagggttgcgatcaatattttgtaaaccataatgaccatgcacacatgtaccattcaccacaatttgaacatgaagaatttggtactcccatgaattcagactccaccacagaagctttaatactctgcaagcaagactatgatagatctacatcacgaattcatgcatatttagatcagattttgcttcacctacaaaaggaggaaattcatgaggaaatgtatgttgtccctaatgaagtgtctagtcccattcatgtaaataatgttgaatatgaacctaatttagaggaacatgaatcgactaatgacaccaccactgttaatgaggaccaatatgcatgctaccatgatgatgattatgatgatatgttagaagaacatgaaaatattgtggaacctgttggttcaaaaacatatggcttctcgccctcgaccttcatgcatgttgttttttctaatactcattgtaattcatatgattttgatattgacatgggattcgtacaattattctgtgaagatgggcatgacataggaatagttgaatcttctgtagacactaatatgcatgaaaatatatttgatgtgtctgattctctacctaggtcatattgtgataattctcctgatttgccgatgcatgagaataaatttgttgatgatgttgatgactctgattgtgatcttgccaatttgtttgatgattgtgagcatgttgtgacacgtgtagaagacttaggagatgttgatgtgattaataatgatgtgcctatcgtcctacataagtcacaatctgatggcctttcatccaacctagatttggtttgtacccatattgtcaaaccgacttttctgagagtccctaatctaggtttggactgtgtgcttcccaagtcctcttggactattttgcttctaagtataatacatttgaggaaccacagttggaattagcatgtttgcccgtccctagcacagttcatttcgagctagaccttgtgcatgatgaacccccgaaactgcgcgattttgttttcaaaattatatcttctgtaaaatccaggtttgggggtagctcattttgtttcacagcttcacttgcatgcctaccatattattattgtgtgaagctgttgaaacctctacactttgtcttttgggttgatcctcaactctttcgattgttagtgtatggtgaatttttgtatataatccagtagataaaatttcttaaaaccccttttgttcattttgtatatgtttttctaatccaatatgatctcggctgaaatatgttggattttttttccttgaataacgaagtttaatcttgctttcgccgaaatcgggtattctctttcctttttctctactcaacatgatcctcttcatatgttgtattataattttgttcatatttttaaacattgaggacaatgtttagtttaggtttgggggtgaaaagtagatactttgataatatgccataattgaaaacgaactccttcttcttttgaaaaaatcgaaaaaattcaaaaaaattaaaaaatgaaaaatcataaaaaaggagctcatttaccttgaaatgttgactcttgtgcaaatatgtaattattaggagtcttagtctagatatttaggcaccctgattctagcacaattcacatagtgataagaaatttgcacgcgcacgatctaccaatacatgtatggcatcgatcttcaaggtgtttgataggaagttacgattgccaatcactttagaatactgaacgaaacttgactagcttgttctttggttggtagggatagaaggtggaggttacattaagaaagacaaccatcgaatttaactgggtgcatcaaaaagggctacctcttgcaaagtgtcatgtaatttttgtttccttttgtatatgtatcaaaactgtttccttattcaaaaaaaaaaaaaaatttcagaaaaatacaaaaaagtcaagtatttatcaattccatcatctcttgttccaaaaataaaagagagtagtcaatgtaaataagagtcatgtaaatagtcattttgttgtttcattgtaataagcaaggagggtgtatgccattgatgtacaacgcgagtaattgtgaaatacctccaactcattcacaattctcgtaaagtccggacagctagctagatttcgaccttggttcttagcctgagaaactatctcttggtgattagtagtcataacatccgatctttctttacacatgtgtagatacactttacactcttatcacatgtctttatttgttatcagtgctaggattgtgcctttgatagctagattgacatctccattttgctgtgagcttaaactgacttgcacatgtcacatttgatggaatctgagcttatattttgacctagaactttgtaggtacgttctaagcaaaccttcacgagacttcaactcgtccactagggacacttagtggtttaaaaggcttagtgcatacgctaaatgcattcgagagaccagcgacagtggtataggtaggatttccttagttttgttttacttgaggacaagtaaaattcaggtttgggggtatttgatgagttccaaatattgtatatatttatccctttttgttggcatttaactcatcttttgtgcagtaattctacattttatcccatattctgtattttcattgttttcaagaataaatatttttcttacttaattttgcatttttaggtaataaataaagtctggataacttgcggagcggaaaagagctgaagagtggtgaaaagccggaagaaattacgcaaggaagccgcaaagaatggagcgcacgtccaaaaagctaggaatgggctcaagaaggaagaattgttcttaaagaagatatgggcttggcatacccaaggcccaaaacccttacccaaacccattttctatatccatacccgcctccattctcaaccgttagatcggatccatctcatcatccaatggtcgatccttcgtagagcatcaaaatctgaagtctctgcaaaacaccatagtacctaaattccaagccttcagattagatcacatttagatcctacggtcgcttctttgcctgcgcatcaaatctcgatacttccgctaaacactacagcacctaacctcgatcttcgccgttaacttcgttgtatcaagacatccgacggtcgctaccagattcttcaggggtagccatccgattcacctaccagcttcgcatccagtgactcagattcgccaacatcgaatcttgatatcccgcctaacacccaagtatcgaacacctatacccaaccaaacactccctacatcccaaaacactcgagtcttctcctccctctcaacctatctgtctgcaactaccactccgcctgctctcactgccaccaccaccatacccttccgcaccaccaccctgccatcgccacttcctccactgtcaccaaacaccacctacacgccgtagctacctcccctacctctatagccatctaactcattgatttttcaccactgaaaccctaggtgataaatcaataaattaggtgaggctataagacgcaattgaagacatggagaggagcagagaagagagaataggcatgggtcgacatcaattcagggattaggtgagtggacttttcaattcaaaaattagggtttcgaaatttggggatatcttgtaaacctataaaaggcaactgatgtgtagagagaagggtgttcttggactatccaagttaccaattaggtttaattttagtttgtaaaattctaatttcaatttcataaacagttagggttctgttaatttagggttcttcatttgctgccactgtccaaatttcaattccatactttattgtttaattccatgtttaggttagttttaatttcaaattcagttaatttcaattttcaattttattcttagtgtttgctgttaattgtctgtgttactgttaattttattttgtaaattttgtgaatgtttcattgtttaatctatgttaggatagtttaattagaatgtttcactgtttaatttcactgtaaatgctcctgatttgtgtatgatactatgttatctctgtgatgtttactgttttgtgtgaatgttaggctaaagcctttgaagcattggattgattgagcagtggggagaaactagtgctcactagtgactgtgagcaaactggttctcttcccactctagttgtatgcctaggctctcaatttgtttttttttataactgttttgtgccttgttctcccacttcccttggctaacagccttggtttatttggttttgtttcctgttaactgccactgttaccatttgtttcattgctgctcccttgccttaggttaactgcctttgtgcctcattgccactgatttttgcttctttcccatgatcattgttagtttgtttcactaccatcttcattgtcattgtaaatgccatccttggccctgtgtgattttgtttcctgtcttcctttgcttctgctgccttgttctccccctgctgctactacttgctgttactgctgctgctgcaactgagcttggctcagctaagaccacagttcaggttaaggcccagccacagttcactgtgaaagcccagctcaacccaagtctcaaatcacatcacaagcccagtctaattcagtccaccaaaggctcagttcactacaataagcccaagcccaaattcaaaaccaaagcctagtgcactacaaaaccaactgagcccaagctcagttcatttcattaagacaacaccccaattcattccaagagtattcaaaggcccaaatcacaatcataacccattggttaccaaaatccattggtacccaaagcccaacaatagcaattttagagcccaaaatagctagaaactccaaacacacccagtctctgtggatcgacccgtacttgcacgagctataactgacaaccgtgcacttgcggtattactgtaggcccgtttcatttcacttcaatttttacacacctttccgggcccaccaacgttcacaactccgttcaccgaaactggagatgcgatcgagcacctaaggacttaccgcatgacgctaacccaatgggatcattacgatgtagtgttgtgtaagtgttttccggctagcctaagagacgaagccctgatgtggttcaagaactttccaaaaggctcagttaagtcatatgctcacttatctgagatgtttctagaaacatatatattcagaatagcagagttcgacccgaagttgacgcgttgttccagatatcccgagggaaaaatgagtcactccgctccttggtaaaacgatggagaaaactatgtgccgagattggaaaagtccctgaagcttacgcaatcttgggcttcaaaaatagtcttaggaagacataccctatattcgtacgcatgtatgaaaccatgccaaagaattttgggaagttaagagagatccaagaggattaaatatccctggaagaacttcaatacggtacttacgataagttgttgaaaggaactagtagaggggaaaatgtggtagaaccacagaaccttcaggtgccaccccaaggagcggggcgatccaacaataggtcaaatcagttcgataaacatcggactgggggatggaaagggcgagaccaggcccatcaaaagaagaaaaatttcgtagatccagtgtgcacgaagctaaacactgtcatattcgagatcctcaaacagatcgaagaaatcataaaatcatttattcatggaacagaggtcagcatccagagcgggctaaaaacagaactgacttctgcgagttccatcaattgcatagccacacgacagactcgtttagggacttgaagaagatggtgcaatatatgatcgaccaaggaaagcttcaagagtacatcgcggaaccagtgatgctactcacatccggggcacccgtacctcgggtgcaaatccctcgtgaggtgcaatatctagggtgcaatacaatatcacactcgtcaatcgtgatccccacacctgaaggaaatattacaggatgaattcacaaacgcaacttcgcgggtgatgaagtctacagtgtcgctagagagcccctgatagaggagtggataaaattacctatcagtttcccagcctcggaggcaccaaatggagggagaaaccacaacgaccccctagtggtcacgatggctatcgcacttcccgaatgcgaaggcaaggaggaaacaccaaagacattgccttgggcgatgccaaaaatcctgatcgacggaggaagttctgtcgagatcttgttttacgaaacattcaagcagatggttcttagagactattgcctaataccctccacctacaacatatttggctttaacggctcctcaactcgccctaaaggcgaggtgacattagagatccgggtgggaacaatcctcacccaaacaaatttctgtgtggtagatgtattatcaccctacctaccatcaaagactaagattccccacgccatctagagtcgcagaaattattggagactctggagaagcaaagcactgctactagatggacgtacggaatgacgaaaacaaagtaaattctgcaagagcgaaaaagaagcgagccaagaatgccaaaaatcaggccgatatcgatgcttatatatccatgacgaatgaggcaagacgatcaaacagtgagccagttcaggacaacgtccctacctcagacacgcccatggagaccatacaaaatctctccgatatcgggggactcaaatccaatttctcggcctcggagccgacaaaagaaataaacatcagaacacccgaaaatccgagcatggtgagaataagaaatatcctcgataaggaggaagaagaaaaattaatacaagtattaagagaatactctgatgtcttcgcgttgcgcatggaggacatgcccggaatagacccggcagtctgctgtcaccacctaaatatcaacccgaagcacaagcccatacgacaaaagatgcgacaggtagcaccagaataccacgaagctatccaaaaggaactaaaaaaaatggaggcatcaggggtgatacgagaagcacagtatccagtatggatatctaacatggtgattgtacctaagaaaaatggaggggtaaggatctgcattgatttcagcgaccttaataaagtttgtccaaaagacagcttccactccctaacattgatcatctcgtggaggaaacctccggatacagatttatatccctaatggacggatactcgggttataactcgacccccctcgctgaggaggaccaggagcatacctccttcttcaccccccgaggtctatactgctataccaaaatgccatttggattaaaaaacgcagacgccacataccaaagaatggtggaaaaaatgtttgatggctggatacataaaactttagaagtatatgtagatgatatgctcgtcaaaagaaagcttccacaagatcatgcaaacgatctcagggagatcttctaccaaatgaggaaatttaacatgaaaagcaatcctgcaaaatgcgcctttggagtaacctcgaaaacattcctgggatacttggtcaccaagcatggaatcgaggtagatcccgaaaaggtgcgtgctatactagaaatgccttcccctgcgacagtcaaagacgtgcagagagtcaatggtcgactaggatccttgggaatattcattgctagatcgtccgataaatgtaaagacttcttcaataccctgaaaaatggtgaaaaattttcatggagtatcgactacgaagaagcttttcaaaagatcaaaaaacatctggcagccttgccgatccttcagaagcccgacccaggtgaaaacctttacatctacctttcgaaaactaatacctcaatcagtgcggtgctaacttgcatagacaaggaagtggaacaacccatttattttataagttagactatgacttcggcagagaagaactattcaaagattgagaagatggtgttatctctggtctatgcaacgcagaaattgcgtacttattttcatgcacacacgataacagtcatcacgaaagctccaatagaatctgtactcgatcatgatgacagagctggcagaatctccaaatggggtgcacagatcaaacagtttggagtcaaatatcaagcccaaacgacaattaaaacccaagcggttgcggatttcctggacgatttcccattagatgacactgatgagatcgaacaaatcccaggaatggaagacgaattagaagatcctcccgaggtacttcgctcagaaaatctaaggcgatgggaagtcttcgtggacgggtcatgcaattcgaagggctctggcatcataatggtttttacaacgccgaccgggcgaaggatcgtctacatcctgagactcgagttccctgccaataataatataatcgagtacgaggaagtcatacacgccctccgagtgataatcgcgttaggcatcagtgaagtacgtctcacaagtgactcgcaactcattgttccgcagatagatgaaatgtatcaagcctcagacccatgcttgcagcgatacctgcaactcgccaagcactacatcgagcagatacaaaaaatcacattccgaaacttaaatcggataaataacagatacgctgacgccctggcaattctagcctccatgataacagaccccgaggctactaatgtcagaattgaaagggtcatgctcccatccattcccatagagggaaatatggacatccttactttagactcaacaacccacgaagagagtctccctgtggatgattggaggatgaaaattacaaaatatctagctaacggggacctcccaagcgtccaacaagttgcacacaagataatatcaagatcggggaactataaactccgagatggaattctatacaaacaatcttacctatgacctcttctcagatgcctttccttcactgaaggccaaaacatattaaaagaaatacactacggttatacgggaaaccacagtggtgggcgattcctagcccacaaagcaaggttagaatgatacttttggcctcgcatgaacgaggactcaaaaaaaatggtaaagttttgcattgagtgccaaaaatttggcaaaagaaggcatgcacctttaatggatataaaatctgtcctaagcccttggccattctccaagtggggagtcgatattgtcggacccttaagagctggaaccagacaaagaaagtatttaatagtggccacagattacttcataaagtgggtagaagcctcggacctaatacacatcagggatcacgatgtcttcaaattcctcttcgagcatatcatatgccgcttcggtatcccagccgccatcgtttcggacaatggggcccaactctgagggaaaaaaatcgatctactcttcaattgtttcaagatcaggaaaaacaaatctacactgatctaccccgaaagcaatggccaggcagaggcaactaacaaaaccatcactgacatcctcaaaaagaaactcgatgtgcatggcgcgagttagtgtgaacaattacataacatcttgtgggcctatcggaccaccaggagggaagcaacaaggatgacccccttcgctctcacatacgacacataggcgatcataccaacagaagcgatgatcccaacaaccaagacggaggcatgggagaaaaacctaacctcggacatgatactctccagactagacgatttggaggagaataaagaaatcgctttctagaggatcgaaaactatcacagaaggttagctcgggaatacaacaagcgtgttcaccagagagaattcagcctaggcgataaggtctggcgcgagatttttccatacaagcgcgagtcaggaagattcgcacccgtatgggaaggcccactgatagtcctagctaaggcaggagatggagcatatagattgctcaaatcgaacggtgaagaacttgaacgcccatggaacatcaagtacctaaaatcttacaatgcttaacaggaccacttactagataatcaaaatccaagaatagggcctaatccctacttgtaacgaaggtcatgaaacctcactcaaatgtaccagggttcaccaaacctcttttgaagataataaaattactcattttgtatatttttagctgattttttcactacaacaaaacacacgtttagtgacaaaattttatgtgaccaataaaatttagtctaccaatcaagtgtttaaggaggaatatttttttggtcaccatatatattttttcggcgacaaacggtaaatttagtctttaaagttgtcactgaaaatttttgtgaacaaatatagtgaccaatcctgtctccgtcccaaaacgtttttcttgtgaccaaatatagtgaccaattttgtctccgcctcaaaatatttctttgtgaccaattatttcggtcacggacttggtttctagtgacaaaggaaaattatagtctccaaacatgttattgctaacaatccgagacttttgtccctgaacgtatcttacactgacaaaattagtttgttgccgaaataaatgcccgtcaaataaggattttgctgttagaactattagtatccaaacaaattgttgtcgcaaatggattgtttctgctgacggagaaaaaattggtctccgaaagaactattgctcataatgtgtaacttttgtccttatatctatttgtgcaaacaaaaattgattcgtcatctaaatgaatacgaagcaaatatgaaattttaccgttaaaactttgtagtggcaagacaaattatagtcaccaaatccgaatattcagtgactgcttgtgattttgtctactcagttctaggaattgaagtggtgatgttgcttcagagtatgactggcatccacaggcatacgtgatggatttaacaaggacactcctcacaggcagcagctgaacctgaatcacccgaaggtccacctagatctcaaacaatggacttgaacctcaagaacaacccaatatccctcctattatactaatatcaataggtgattattattctgtgagcataatctataagaagggaaattacaacaaaaaacaagagacagggattcgcatatttgagtactaaacacgagattgacaagtcaagcaactgagaaatactttcttctatctagtaactaactaggatatataccggtctaatagggatataagttactaagaatgatctacaaaatcccaagatttgatcaataaaaacttctgattttcaccgtcacattttacatggaaactgccgcgaagaagaatctcttccctgcacccttaaggttggccaccaaataagaataccaacttattattgcaaaggaacccctccatggaaatataacaaaataaatagaaaggaactaattacacacatcttggtttggaattcacttctggaactggtcagaataaaaatggcgggaaactagaaaaaataaactaaagtaaaatctcatagaaccagctaaatgcttaatgcaattgtgctgacaaaatcttgggaatcatcacaaacttgacccgcctcccatcatcttctttcacctcttttcctcttcaactcaaagatgatttcggtacatttgttgaaatcagtctcagcattctacagacttctgttctcattacttctttatgcggatgactttgaactccggactaaatgaaaaagaagacatgcagagcaaggctagatgataaggtccttgaatgtctctaacttcccgtttacagaaatagaatctttatgatgacccaaacccccattcacgagggtatcagaaatcttcccatcagcagatttgatcatgatggagcttcgactaccttcgaagtaacacgagaaaccgcataattcggcacaccgtattttccatcctacaattaaaaacaaaagagtcaggtagggaatgcaattgctggatgcttcagactctaccaaagaggaaatcccaaaaaaaaaaaaaaaattgttgaagaacacccctacactccgtcctactcacatagaggaagggaaacatggaacagtcaaaagcttattgccaaaaaatcccaaaaccttcatatggcttgaatgcttgattgatgatattggttccaactatccgattcatgtgacaaacttacccacaatgaaatctgatgcaaaacatcaaccgcgatgggattttatcttttgtatccttttacttcttttcttgctttagttataacaaaatacaaaaacgaagtgcttaatgaactaatgacctttttagcagaatccattatagaaaccaattcaccaatatttgacaatcctctggcaagttttgagacatcatcactgagactgtcgacagaatccctagaaatgcaaataacctagtttggcaatcaaactgataactaatactactagatcgacttgaaattatgtcaccctgatgtgtcgttataaagtaaagacgtggcaaacactaacaagtgtccttactaatgcttgaggtgtcgcattgtaaaacatctgcatgttttgaaattcttatgtaccaaaggaggactcatagtatgcaggtgggctaaacctgcatggaaattataagaaagacgttatccagagagtactgcttcaagattctagtccataaagaggacgttcttgactaaattaatgccttagaggcagcatctatagcatgggcgaacaaagaaccttctaatgctttttcttactaaaataaccaaaaccaataccagggaagccatcaatgctctctgattttccagaggatcacctttagctgctccaagagctattggaagcctatgcttgaattctagcttctattcaggaacctcagatggccctacaagaaatatgaaagtagactcacttagcatggctgttgagaagagatttggtgaaaataattggtagataatatatggtctacactcagtctcataaaagttaggattacatatcatccacttggaattgtcacaaaatcaggtgagcacttactgcataagtacggaagcaaatcacaacaaattgaggaatgactaaagaaataaaaaccagagctgcatcttcttaaccactataactactgttgagaaagcaatccataatacttgcaagtgggacattatctcaaacaggtaacacgtatcaaaatgatgactgagattaactcaaacgaggaagcaaagaaatacaagaagaaaattacccaaaactggtgattcactcagctgctgatggatacccaaatccttcaaacgaaccaaaactcagtcctagctgcaacaaaataaaaacacaattagcaaatcaattactgttctttagaacaatacaagattcgaatagatttctgagaaactaacggaaatcataagaaattagaaaaacatagatgtaattggtaccaaagcttcaaaatatttaatccacataaaacgtatttgaaataaatagatgaacatatcaaacttacttacctgattaatggatctctacggttacaatcggatgaactccaatttccaccattaaattgaaaaactgtaatttgtaaatgatttgcctaaccattttatgggtaatgcagattacagcatactaatcactaatctgagatcggattcgaaatcgagtaatagaatttacacaagaacatgtcctaaagatcagatgtattctatgtttatgaggggaattctatggtgggtttctaatgggaaaaaacttgttcctgtcgttgttgttgatgatgatttctttttgtcgaaaaaaaatcattcaaatgaagtttcgaagatgggtttcggtttagggtagattttgggtttttgattttggtgagagaaaattaactatgaaattctgtctgtgggttttattacagccttaagtagcaatgacgaagaagaaaaataataggcaacgatggggctagtaggattccaatggagggaaaagaattttagtaaaaattttgttgaaaattttggggatttagtgcgccaaaacttagttattcccgccattactgattgcaattgtgaaacaactcgacgagagcatacggatcaatgacttgtcatagtttattgtcgttggatttaaaagagatgggacgggatgtaaaaataggcggaggggattagatttttagcgaaaaaattggtggaaatttagaacgctatttttaaaaagtaacgtataatatttttttaaaaaaagttgattaaaaaaaaaacatacatgtttgtgtcaattatatttttgccccatgtagatggcttcgttaagagagttgtatcacttgtaatcagtaagatcttttcacttaaaaaggagaaaagaaaaaagttaagtcggacaagtcgggttgttatgctaccggtaccagacacaattgatgaaattaattgaagtcggtagatatgtgaaattaatggataacaagaaaattcgaagatatccaagagaaattgagcaaagtcgagcgatattttgtgatatcgatgaaaacttgagaaactgatgaaatccatgtgaagccgggtgaaattgggtaagatctatggacattcgataaaatttatagataaccgaggaaatggatagaatctcgatgaaaacgagtaatgacaagcgtattgtgtaagcttgatggataacatggaaaatgagcgtgaaaaatcatttgactttagattttgttcttttgtgttagaggttaatggtaaatatcataattcgaacttcggatttcttttttggaacatgttggtggtgttagcactccaacctaactcaaatggagcaaactggaacgaaatgtcatggctcaagaacgtgatgataattatgtacagtagattgagtcggcatgcacattgatagtatcaattgagatgaagttataaatataaaatagtaaggtatacctcaagattttgcataaaggtgattttacgcagatagttggtgagatggctgtggatctaacaaactggagattagcagtgatttggctcgatcaaaggaaataaggttagtctcacgtgggataagagcaattattattattattattattattattattattatatattgcacagtcttataatttttttgatcggaaaagaacataaggtgattcccaattaaaagaaaatcgacttaaatatttttttaatctcattttacatattgatagattatacaagtcaattccaaaaaaaaatcatttaactttagattttgtattatttcgcgttaaaggttgatgctatatatcagaattcgaccttcactttttgatattgtgattcgttcttactcacgtgtcttctgtaaagtacttgcattctcttcatcgtgttttaaaattcatttgacctcattcggtatatgttttggtacaaattctctcaaagagtgtatgtgtagatgataataaatcataacagctattgtttggatatcagaagaagaagttaaaaccaatgagaatcgtcagattatatttgctttttacatatggtgctaagcgtactcttagatctttggataccaataaaattagtgttgatcgtaaggatcgtctaacctcgctacactacgactaagagatatgcacgtgggaaatacacgaatcaaagtttatttataattggaaaaacatagtcgttgtgcaaatatattgttgcgccaaaatttggtacccctaatactgaaagtaaatttatcaatatagtttattaccattaaaaaaaatacacaaaaaccatcaaagtttttcttctcttaattagtaaatgaagaattaaaaaagaaaaagaaaaaattacaagagatattagaagaatttgtggggaaaatgctaaaggcaagacaaataaagtgggggaaatgtgagatgattaatccagataaaatctataaatggagacatgaaaataattaactctttaatctatcccagccccccgcctatccaaatgctagtcattcccgcaagttctttgtcaacgttaaacacattttgtgctggtcaacgaatacattatctaaaaacgtatatattgagttcggttacgtcgcatttttttcttcctaaatgatcttttttctgaaaacctatatattgagtttcaggtcgcaattttttctcaaaatcgaagtcggctacatcacatttttttcttcttagcctatagttagtcagtatattcagttatgtcacagttttttctcctaactgaactttcttcaaattaaaataaaaactagccgaactcggttaagaaaaaaaaatgtagcataaccaaacctaatttaaaaaaataaaataaaaaataatgttaatttttttattagtatttattatggttcaaatataaataataaaattacaagagattggatgggagtctcgccacaagctgagctctaacacccttttggatagtcacccctattttttatttaaaagaaaaataattggatcggggttgtcattcaaaaaaggattggagcccagcttgttgccagacttccatctatctcttttaattcctcctcccccgatgaattttttttcttttttagctatccaaaaaggtgttccagccaaacttgttgctaggctcccgtctagtttcttgtaatgacttttcttttattaaatatatcaattttttatccaaaaaaataaaaataattaaataaaaaaatggattggactcattggagtacaacatgtttctcgtctccttgccaatttcctacaaaagtctcatattttctttgtaatttcttaatccaataatataacacaatatatatcggggaaaaattaatttcctcaaattatttttggaaagccatcgagaaatcagtagaataattatgaataaaaataatataaatgtattctgaccattagttaaaatatgtggataagagatgttaggcgttatttcataatgacctattaaaaaatatatatataaatatattctgatcattagttaatatatgcggataagagatgatgggctttatttcgtaatgacctaccaaatataaaagaaagtcctctccgatcaaagttttcacttttcatggtctcaaaaaatcattggtttcaagagtgaaaaagcccaattgcccatctcatgacttctcaaattggattttcttgataaccataggatttccttaaacgtcggatcccttattaatcccaaaataaataaataaaaaccctaaatctagttctacatcaccttctctgcctccctctctctcgtctcccattcttctccctcaatccgatcctctctgctgaaacgcccctttatcacacacgatcagaccaccatcaatcatctacatgtctctctcaaaaccaccagcaccacacaaccaagccaataaccagttttccacctctctcactctctcaagtcgttccttaatgccagagatctactactccacttggtattcgttattgatatggaaaggttggtaatggaagtgagtaacggaaaagctgagaaacatatggattgattcttaacaaaataggtaactattcaaatggtttcattgtttttaatctctccggtggtagatcgaatatatatggtggagtaaaaacctaattttatatcgcatgaggctttctagaaaccgtttatttaccgatcaaaaataaaataaaatgattgagataagctgatttgctatttgctattcttcagagactccttccaatcacgttcctttagcttttttggcagcatcctgccattgaatgggttaatacatttttgataagccgttgaaatggtatatgatcttcgctagctacattttttattttgaacaatatagtttaggtgatccttggaattgacaagggattgttaataacggtatagtaatcatatatgcaagcaaaatttgttctttcagtgaagatatttctttgttttcatctttggattctcaaaatttatgttgccagtggaccgtttctaatgttttatgtgaaaatttgttgcgttttgctcggtgctgctgtgggagctagggagactgatcagtttgggtgcctttgatctctggtgtaccttatccttaaatcttactaaaattgaactggacacatttactgtgcgttttggaaaattggttcaaaggcaagctgcacaaatacagaagatgcaagaaaacaatgcacaattcttaccaaagatgttgaattaattgggctcggatgtgtagtaatgttcaaaatcacatacatagataattaactattggattcaattataattttaattcttgtcattaatttatgatgatgtaattttgtattgttttcgaatttttaaattgttgttatagcaatggtgctgtcatatttaactattttgtttaataaaattgaaattttttatctacattcaaaaaatttagtaaaatatacattgaaagaatttatggtacaattttttttgacttgaaaaattaaagcttgtaaagaggaataatttagtctttaataaagtatttagagactaaaaaattccttttaatgaagaagaaaattgtctgaatttcaagacatttgaaagtttgcttcaaagacaaaatgaatcgtcattgacaaaaagattagagagaattttgtctccgaataattttaaggagaaaaaatttggtgaataataaaatatttagggacgataaatttagtcttcgaaactggattcatgtttttgagacaatttggttttaaatagttacaaaaatcatgttttggagacaaaataatatattctggagaggaggaatttgtttctgaaaattctttttaagacaagaaatttggtcactaatttttttttggagacgaacaagttagtctccaaatatatgatattcaggggctatttatattgtctctaattaaattaattagagaccaatttttttgttttcaatcataactattaaatacaaattatattgacacaaaatttcacttttgagacaattttcttggtcttaaatagttaccagtaaagacaaattaaattgacacaaaattttcgtttttgagacaatttttttggtcttaaataattatcattaaagacaaattaaattgacacaaaacttcgttttagagacaattttattggtcttaaatagttatcattaaagacaaattagtttgtccttgaatttacatttttgcgacaaaaaacttgccacaaaaaagtgccttttggtggctatttttttggtcattaaaataaatttcgcagacaattttatttcgttggtgaaaaagacttttgttgacaataaatttttagttgttaattaagttttctcgtgaccgttcataattttgtcgtaaaatactttcccagacgggtatttgaacaacttcgtgacaaaaaaaaattcatctcagaaaatatttcgagacaaaaaaggggatttcctgacaaaattttttacactaaacctctgttttcttgtagtgtttgttctcattttatatttgtttttgcttcctatgtgcatatagattaatcctatcatacttgcattataacaaaagcccatcaagactatggcatgaagctagccctaaggtcaatgacggaactaggatttgagattaggagtggcttaaaaaaaatctgcccacatgtaaaaaaagagaaaaacttaccttctattttcgggcaattaaatcttgccttcccctgactcgggatagcagctccctaacttccatcccttcaggtatgccttcttctattctcattttaatttagtattttgttctaaatttctctttatgcatctttctttttggattttgctcatcgacgactgtgtattgttgctttaatagtgtaaatgaggtacaaaatattagtcactaagatgtttgcttttactattttcaagaaaatcttcttgttcttaaatatttgttgacatctggtagtctaaatgagcttgttggaggactaccctaaggtcattttgctgcttttgaatgaagtcattgtttctttgcatcttggttttgttttatttttctggtttaatcaagtcatttttttttttgcataagcaacaacgccagcatgtcaataccttgctacacttgtgagaggaaaggaaaaaaaaaataattgcttgtgaacttaagaagggttgagtgaaatgactagaggacactgtcaaatacttttgagcttctagtatcctttctgaatcttttacattttctatacttgccaattgccgatttatatgtatgcgactgcaattgttcatgacttccatttgtttacagagtgtaatggtagtaaaatttagcagtacattcctagtttctctttcttcgtgtgtcttctttcagcaaagtgtattatgcgtctgatatctttttatgcagttctcgctgtccatttagaatccactaacggaccaatttttttttgtttgctattgtaggttgttattcagtctcttaatttctttaaatgccctaaattggaggcacttaacattgcagcacctctgatagtgctgctagaattgaagggatgtggtgttttatccgaagcatccattcgttcccgtatgataacatcaggtgcttgcttttgtgggtaatgcactttcttttctcttcattttcttttgttctttcattaaggtgttgctctcaatctaatatctgtaattcgacatccaactgaaagatgattgcttgtctgctgctgcaactctgtgttggctatcacattgatgttctttaatttatcttatactttctcgttgaacttgtaacctgttttcggttccttcttgcaattgaagtagctttcaacattgatcccttctcctgtaaacgaaggcatacatggtgcattcttgccttcaacttcgtgttgaaactttctggtagttaagtttgtaatagaaatataaactttagcatttgaggttgtcaaatttgaaacttcagtattttagatggtttaagttgtaaattgttggcattttttaatacaaatttagttttaatcagtttgatttttcgggctaatacagttcaaaagtatatattcatttttaatagtgattcaacttttattttcagatataactgaatcagctgaattaatttttttataaaatatgttcaatataaacgtctgcttatatcattcccataaagagactgaccacagatatcgtttctgaagagattcaaatgctcccagaaacagacgtttcgagaaacaagtccacaggttaagggctcccataagcagacgtttttagtgattttaaagcagtttattgcagacttttttttttgatttttccactagtggttctcggattggagcagctgacctaatacccatccgagcctcatccagatgaagaattcgattctcgtgacttcaatgtggactcttttgtggccaactactcagctaaattcaccagcatgagagagtatcaggagtggggcattgatcttgttcaaaatatcgttgtggctccgactaaagctcttctgttagacgtggattccaaacttctcctatcttgtgatgatgattgggtgatgtttcttttggtggttggtggcccttttgtttggggttttgacgaaaagggggctcctcgtcagagccctcttcctaaacattgctatctcgctggttgcgatccctggagatttcggtggtctgtgccagccgaggtatgactttcttccttatgattcattcgtttcggggccctattttctcttatgttccccttttctttcagttcgtgatgcatgtcgccggtcttatcaagttgtgcaagaaaatggttgttactacagagtctttgactcccaaacaagtatatatctcgcctattatattcccctcgtggtatccttaaattataaccttttagtcttggtaggatgacactctcctcgcgaagcagcctgttcttgagtcatctaaggggcgaaaaaggcgtgatcatcatgttccgcctcctccttcttctcaggtagttttacttcgtcattattgttacctcgcatattccatctttttagtcatctttcgtgatgaacttattacttcgcagactggtgtatccccttctggtgggtccaaaaggcaacgaaaggtcttggatctggttgctttgaatgcagttcaaagttctgttattcgtacaagtctctttgctcctcccaaacctcaaccttctcagtctcgcacaaccacttcttccaaggtagatgattctcctattcatcccaaggttgagcatccgaagaagtccacagaggattcctctgccggcaagaagaagaagcagacggctccatctgtgctgtttaaccctctatatgatccggacatgaagtttctccaagatatttacgacaaagctcgcgaagacccatccatgaggtctcgtgctttagaatctctggtgactattagttctgttgacttcctttctcaagatccatcagtactactcaacgcctccataaacttgtctctccaacaacactcagctttgatgaaccaggtgagccttttatacttttcccattatgccttcctcctgtccgagatttatttattgaattacgattcttcaattcacaggaggtctactgtcacatggccagcctcgtggaaattagacttgttcgcgagaaagcaaagaaggacgaggctcaaatcaaagttttgacaaaggagcttcaagaggacaaagagcattccagcacggaaagtcagaagatagagaagcttttaagtaatttccctcccctcacagaattgttcttttcctttgcttttacttatgttattttcttattttgtatttcgtcaagcttgttgtatgaaacgccaaatggattcctccgaagcatctgcctcgctagaagatattcgtgctgagaatctgaacctcgtgacccaaaatgactgctatgtgtccgagaatatgattttgaatgagaaggtcgagactcttttttcaccagtggaccgcatgtctattgattgttctcgtaacgaggaattaaattatcatcttcacgacgagaatgagcgtcttaggtctgatcttcaacggatcagcaactccctcactacttcaaggaacattcattcttcgtcactagctaactataagagactggaagaatataactagcgcgtgatcaagagtaaagctaaagtcatggttgatcttcgcaaatctcgtaacaaggtagctggtttaaacgaagagatcgactgtttgaagaagaaagtggaatttcttcaagctcagttagataactcatctcgtccgaggtctatcaaatcttcttctcaaaccaagtccacgggttgggacaatgcctaccacgagttatgtgttcaacttcacgagtcggatctaactatctccatgctagaccatttgcataccgacgtccaagaaaccttggacaccactatcttgcaaatggaaggaagctttaggtgcagtgcggaatactattgattatgtcagatttctagtttctgatgtagttttatttggttttgcagaatctgaagatcgtcacaagagccaagtccttcgcctttctcgtgaaagggatgaatttcgcatagaggtttctcgtctgaagaatgaggtcagtgatttgaatgctgacatggatgagatgatcataaattctgcgaaggtagccaagttagctcacaagaacacccaggactatctggtttctctttttggtaatttatgcgacgaacatgaccttcctcgtcctgtctttcctatggaggtgttctccgatgatgagcaaccaaaggacgatagaatcatctctggagaagaagagaggctcaacgaagatgacgaggaacggaagatcgacgacgcgaaggtcgaggaggaagaatccaagggtgcctctgccaagttttggtgctggtcctggtgaagcgggtgatgctttctctgatgacatccctcttcagcaacaatcttagtttttcttccttcatatttatgtctaattatctttcaaacaatttatatttttgggcgctcccaagcttggggggtaaaacatcttaatttctttgggtaatcttttgattgaattttctgtcactattatgattttctattttgtcaagtatatacttaccgaaaaaatacttcaaaagaataattaaatttaaagcatatacttgcctcttattcttttgtgtatttccgaggtacgacccaaggctaatccaaacctccccataaactttagaccttatgatttaaatcttgcgagctcctttcttcccatggggttcactaggaatcttcgccgcatcttatattgaatttcgtctatgcttttcacgtcgtccccctcttcaacttccttatttcacttgttctttcttttgccttttcttgacagggttttattttggcgcaacgctgagtcttgcgaggataatgctaaagaagaacataaaatgtaaaagtatatacttgcctcttattcttgttgagcattagccgatcaaggagaagttgttcaagtcaaactatgtcttccccttggtcgccttgcctttattgcggtttcacaaactttgaacctcgctagattttttatctgccttcttttatttttggaattcattaagtgtctcgccataattagtccttattctctttctgattgttacatgttactttatacaaggtcttactgtgcctcctaattaaggtcttattgtgcctcatccttatttaaggattttaattcgatgaagtctcagacgcttattactatttcgaataataatcgatcaacctcgccttaacacttatttttccccatctcacgacaatgcgacgggtctagacattcccatgaatgttagttccatgacattgccgtcttttttggtcatacaactccctaatatggagggtgccatccctttatattccccctgattgccccttcaaggaggttaacctaacgtgcatgttggtttcctcccatccagttattacgacattcagttgttttcttggcttcttatcaccttcgccgatatggcttggggttacgaagtcacaccctaaatgaggtttctttgggatcgagtgcatcgtagccaagaattgccatactgacatggacggtaacgctccagacgtcccaggcacccgcagctcaaccgaatacgtcggcgccttggtcattgatagacgcatttatgtgtctaatttgtcctcaatgtttcgtattgttagtactcgttttcgtccttattatggtgttttgtgtgtttgtaggaattttcgggaaataaacatttttggaaaattgggctcgaaaagttgattttgacacccggagaacacatgttattcggactcccctgccttgataagggcacctcagtttataaggggaaccgtaactggacagctgttatttacactccacagacggataaggtggcaacccttttttcctcatttgaacgatgtttttggcgggaaacaaattagggttgaggttttgatcgagttttagagagactaaaaggctgaaattcattgggtttacttattaggcctaaacagcctggtatagtcatttgattgaacccaaattggttagaactcgagttagaaggaaacagagaagcaagagttttgaaagagaatatcacgggattacacaagatttagacgtgtaatgcttgtgcttggattgtgccaaactggagcagaaacgtgtagaaatcaaataaggatagtttacagtaacagacgcgtgaagaagaagaaaaaggaaataaaaatatctccgaggctggcagagttaaaggagaattattacgagttattacaagagattttcatcgcatattgtgtataactagcgtcttggggtagcagagaagatgagagtttgggagaggaatagagcaccacagagtcgaaaaatcaagcagcagaaacctccattgttgctgctacacgaagagcattgacccacaggaactgtcgttcatgctacagtgacagcgacacaaggacgacaaacttatttgctacagcgttttcgacacagagtcgtgggtcttagagaaacagtaacagtgacacatcctatgtatcgtttttttggtttgtaacaaatataattgttacaaacccggttttgaattatttctccattttcatcatttgtaaacaccctttgatcaataataatgatttttgagcgtgtttccaacaacatgatgagaggctaaattctctaatatgtaattataattcactcaatcactgcttttgcagagttcttaaaagtttacataattttcttcattagttgtgattcaattagataggttatgctttgtttagataatatatgcttaggggatacaattaatatttgagaatatgtttgattatttgtgaattaagaaataaaggattaaaaggatgtgtaatagtggattctagtgtcttggctattcccaatatcttgaaaccaaattttgagttaagctttctttaatttttaagtctaaattcttttgctttcacaagtctcaacgaacctttttactacaactcaattgaaaatcacatcaatttttggcgccactgacgcggacttgtctttaggctagagcttttagattttttttcttttctaggtttttatttgtttttatttgttttattttttttgttcttctttacgcttttgggtttttgtcttttctttacagaatttggaatttggagcgaaagaaaatttttccaaagcttttggtgaatacttaaagacttggagtaaaaggcaaagccaaaggagcgaacgaagaagaattttttttattttatagaaaaaagagagaaaaaaaagaattttttattttttattttatttattttttttagactttccttttcccttgtactttcattttttggactttggactgtaaactttgggacattattttgaaaccctacagaagggtagtttaaatattaaactgtttgcagagaaggacggtgattccgatatcacctcggcccctcgggttcgtacatgaaataggagtcgtggatggagtcgactacaactgttcatcccccgtctggaacgtgaggtaagtttgttgaaacactcgctaatcctctgctagcgagttactgtattccttcgtttgcatatatgtcgaggaactgaatacggctgctttaatttcctagtaaagggaaaggactggccatacaagataagggttcggatttcatcaccgttctcttcttgcccgccttaggaaaacgatacttatcgcgaacctaagatttaaaatttggaatagaacgagacctatagggtaacgagcttagtaggaaagtcgttcgaaaaatattggttacccttttaagcatacttcgaagttcatgatggtttctgtgagttgaatgcgtgactgccccgccttgtaatatcggtgaggccttgggtacaaagctccactcagcttccctcgcctctattgaacttactttgactcggattgattccagaggggtttgcttaaattgtaacgaattccctttcgaaggattagaagctgttctagaaacaatctaagtggagccatcatgctttttgtttgctagaaatcaataggtttgttgtggtggagtcatacttgtttgtgtttgcttagatattcccttccttttaggattttttctttgtatttttgtttttctagtatatgcccgaggtcattaaagagcgggcttggaaaagaaaaactctaggtcgtttgattagtgacaaacctagtaattcttcttgtgaaggcggggagatcgaagactcttcatttgagagccctgtctttggaaatttcagctttgaaaacttgaaaattagtgaagaaagtactcctagtcctttggtagtgccagaaatgacaactttgaaagctttgttaaacccaactaggacctctcgtccgtcttgtatcaagttagctgaaaccgaggcaaattatgaactgaaacctgggactttacagatgctcccaatgtttttaggaaaagagaatgagaacccctattttcatgttagagaatttgaggaagtttgtagcactctgaaaattaaaaacctaagtgatgatgcattgaaacttaggttattccccatttccataaaagataaagccaaatcttggctgtatagtttggcctctgagtcaattgaaacctatgaccaacttacttttgcctttatacataagtttttcccaaggcataaaacatcgtccattaggacacaaatctgtactttttcccaacaagagggagaatctttatataggtacttagaaaggttcaatgacttgatatctcaatgtcctcatcatggtatggagaaggttaggttagttcagatcctctacgagggtttagattattcgacaacaacaatggttgagtccttatgcacaagtgcgtttgagaataaaactgttgacgaagcgatgacatttttgaatgaaatcgccgataagacccaacaatgggaaaatagtagggaacaccagaaaacaattcttctaagtagaggaaatgttaatagggtagaatgaacttatgagtcagatgccaaaatagcagatatatccaaaaggttagaagccttagaattaggtcattctagtggtagtagtggaagaaatgagcctttttgggaagcccttgctgttgaaaagcaagccaatgctctttataacaacactatgtttgataaccgacagaagtttgacccatattcagaaacctataaccctggatggagaaaccatccaaacctttcttggtccaagggccagaatcaaggtcagtctagtaatgctcaggttcccccaggttttggctatactaagaatccttcaactccggtatagtttcagaacccttcggataagaagattatgagtttagaagagtctcttgctttgttaactcgtaatactgtgcagtttcaacaatctgttgctcaaggtttagaagaaaataagagaataggtcagtctaactgtcaggctatttccgagttgaaaaaccaggttagtcaaataaatgagtctttaagagaaagaggtaagtttcctagtcagactcaacccagccctagagaaattaatgaaataggtgaaagaccatctgatcatgtgaattctgttacaacccttaggagtaggaagaaagttgacaataaggtcaccatgactgaaagtgaacatgttgttgttcacccttctgagccagaaaatgaggagattgatagagtctctaaagagaccaatgagggtcatgttgagcccgactttgttcccagacccggttcctccagctgctagttccaactaagagggagtccaactttaatgatatattggaggtttttaaggaggtaactatcaacctaccattgttggatgcgattaagcagattcccgcttatgccgagtttcttaaggacttgtgtacacgaaagcgtaagcttagtgtccaaaagaaagccttccttgctagtcacgtgagtttcatttttcagaataccactactcctaagtataaaaacccagggtcccctaccatttcgtgcacaataggtaaataccgtgttgagaaagctttgattgacttaggagccagtgtgaatttactttcgtaccatgtgtacctcaatataggacttggtgatatgaaacctacccagatgacacttcaattagatgataggtccgttaaaattcctcgtggtgtgatcgaggatgttcttattgaggtcgaaaagtttatttatccagtggatttttttatcctagatacccaacctgtccctgacccagagaaccagataccagtgattttaggtctcccatttttagaaacatccaatgcgatcattaattgttgaactggcattatgaatttgtcttttggtaatatgactattgagctgaacgtctttcatattagtaagctaccctctgaactagatcactcgagcatagaagaggtaaacatgataggaacattagtcgaggagtcattaccaaacactttgttagaagatctgttagagaaatgcctagctcactttggtattgatttcgatgatgataatgtgattaattaggtgaatgctttgttagattcaacccctttgctagaaactagtaacggatggaaacctaagttcgaaccactagcagtttctaagtctaccctagttctttcgttagaagagcctcctaagttggacctaaaaccattgccagataccctgaagtatgtgtttttaggcccgtctgagactttacctgtgattgttgcttccgacttggatagtgatcagaaaagtaggctagtgaccatccttcaaaacaacaaggaagctttagggtggaccaataacagacgttaaaggtataagtcctaatgtttgtatgcatcagatctatttagaggaagataccaaaccttctagggagatgcaacgaatacgaaaccctaatatgaaagaagtagttcgaaccgaggttcttaagctgttagatgcaggtattatcttccccatttcagacagtaagtgggtcagccccgttcaggttgttcccaagaaatccggtattactgtagtccagaatgataacaatgagttaatccagacccgagtaaccacgggttggcgtgtttgtattgactataggaaatcgaacaaggtcacttggaaggaccactttccccttccctttatctaccaaatgctagagagattagctggacatagttattactgttttctagatggctactctggctacaatcagatcgttatttccccataagaccaagaaaaaactacttttacttgtccctttggtacctttgcgtatagaagcatgcctttcgggctatgtaaaggccctgcgacttttcagcgttgcatgatgagcatatttttcgatatggtagaaaagtttttagaggtctttatggatgatttttcagtgtttggttcgtctttcgatgagtgcttgcatcatttgtcattagtgttgactaggtgtaaggaaaagaatttagtgcttaattgggagaaatgtcatttcagggttcgatcaggaattgttttagggcatatcgtatcttctaagggtatagaggtagataaagccaaagttgacctcatcaagactttacaggtccgaaaaaccgtaagagatagtaggtcattcttagggcatgcaggtttttatcgtcgattcattaaggattctagcttgatttctatacctctagtttgtctttgatgatgcttgtttagaggcttttgagaagatcaagactttactcactaccgcccccatagtccaggcacccaactggaacttaccctttgagatcatgtgtgatgcttcagattatgctattggtgttgtgataggtcagcgagaaaacaaattacttcatgtgatttactatgctagaaaaaatctgaatgatgcctagttgaactataccaataccgagaaggaactgttatccattgtgtttgccttagacaattttagaccctatctcttaggatcatgctgctttgaaatatcttttgtctaagaaggatatgaaacctagattgattatgtggatccttttgttgcaagagttttctccggacattagagacaaaaagggtgcagaaaatgtagtagcagaccacttgtctagactagttgttgattcccctgatgattcccttcctataagggatagtttacctgatgaacaacttttctttgttacccaagcaccttggtatgcgaatatagtgaattatcttgttactggtcgaatgccccaacattggggtaaacaagatcgttctaggtttttagccgaggttaagcacttcttttaggatgatccttatttgtttaagtattgtctagaccagattattaggagatgtatacctgagagtgaccagtccaatattatttccttttgtcatgatcatgcttgtgggggtcactttagtgctaagaaaaatgctgctaagatattgcagtgtggattctattggccttcgttgtttaaagactcccacagttattgtgtgacttgtgaacgttgccagaaattaggaaccatatcccgtaaaaacatgatgcccctgaaccctattttagttgttgaggtctttgatgtgtggggtattgactttatgggtctgtttcctaattcttttggtaacttatacatccttgtcgctgtagactatgtctctaagtggattgaggcggttgcgtgtaaaaccaatgatcatagggttgtgattgagttcttgaaagataatatacttacacgttttggtacaccgcgagctataattagtgatggagggtcgcacttttgtaatgagccttttaagcttcttatgaagaaatatggcattacacataaggtagctaccccatatcatcctcagactagtggtcaggttgaggtttccaatagggagataaaatgtatattagagaaaacagttaatcctaatcggaaagactggtcgtctaggcttactgatgccttatgggcttaccgtactgcgtttaagacccccattggaatgtcgccttatcgtcttgtgtatgggaaggcatgtcatttacctgttgagttagaacatagagcttattgggctgttcagtagctaaatttttcacttgacaaggcaggagcccatgggaaactccatctcaatgagttggacgagattcgtatagatgcttacgatagtccgaaggagtataagaacaaaatgaaacttgtgcatgataaaaatattttacggaagtcattttctccaggtcaaaaagttcttctgtattatacccgcttgcatcttttccctaggaagttacgttctcggtggacgggtccttttattgttcgcactgtctttcctcatggagttgttgaaattgagacaccggatggtagtagttcttagaaggttaacagtaagagattgaaaccctttttagatccctttcctacaggtgatattgaggaggtccctctggaggaccctgtttacccttgattgaccatcgaggcgattgcatgttgtatattagtttttgatttctctcttcacccaggtactatctttccgacttctctctttactgattctcgtgttactttactttttggtattggtctttcattagaaacattgaggacaatgttagatttaagtttaggggtggggaagaaacttttaagcttttagtttcaataaataaactctagagcctagaaatttatgcttattaaggttggcactaaccaatctaaatggatgggaacatctaaagagtctattcataaaagcacagagctcaggtgttagaattaaaaaaaaacatggtagtttcgccatatttcgttgaatcctaatccttatgtttttttttaagtgatttggtggggcacacgattcaagttgttacctttgctatggtgaaatatggtgattgagataccaaaaaaaataataaagaattaagaccagaccatcagtccaataggaataaattcaataaagtcaaccactggtgcccttgtatatgccagttgtgttgacctagagttaggtttatcgaccactggtccccttgtatatgccagttgtgttgatattagtcagagcggtatctcagtccattaggataggtccatcttggcagaggccttcagacagatatgggaaacaccgttcactttaaaccatctatcttttctctttatccatctttttaatctttccatgtgattggttgactccggttatgatgtacaaaaactatctgagtagagctttgtcactttatatgaattttagcatgtaggtgcaaactcgtgtacatcaattggaatttcgcatcagggtacttcctcttgtagtcaataagtatgccaaccaaagagattctttagtgccttccaaggttctgcctagatagctagggtttggagtaaaaggtttttgtgggtacacctctattaaacccacccgagactaactcggtttcattttttatattagttttgctcgaggactagcaaataataagtttgggggtatttgatagacgcatttatgtgtctaatttgtcctcaatgtttcgtattgttagtactcgttttcgtccttattatggtgttttgtgtgtttgtaggcatttttggaaaataaacatttttggaaaattcggctcgaaaagttgattttgacacccggaggacacgtgttatccggactcccattttataaggggcacccgaactggacagctactatttacactccacatacggataggggggaaaccctttcttcctcatttgaacgatgtttttggcgggaaacaaatcatctcacctgcagaattagggttgaggttttgatcgagttttagagagactaaaaggctgaaattcattgggtttacttattaggcctaaacaacctggtatagtcatttgattgaatccaaattggttagtactcgagttagaaggaaacagagaagcacgagttttgcaggagaatatcacgggattacgcaagatttagacgtgtaatgcttgtgcttggattgtgccaaactggagcagaaacgtgtagtaatcaaatgaggatagtttacagtaacagacgcgtgaagaagaagaaagaggaaataaaaatatctccgaggctggcagagttaaggagaattattacgagttattacaagagattttcatcgcatgttgtgtataaatagcgtgttggggtagcagagaagaggagagtttgggggaggaatagagcaccacagagtcgaaaaatcaagcagcagaaacctccattgctgctgctacacgaagaacattgacccacaggcacgctatttgcgagtcattcatgctacagtgacagcgacacaaggacgacagccttatttgctacaacgtttgcgacacatagtcgtgggtcttagagcaacagtaacagtgacacatcctctgtatctttttttggttggtgacaaatataattgttacaaacctggttttgaattatttctccattttcatcatttgtatacaccctttgagcaataataatgatttttgagcgtgtttccaacaacatgatgagaggctaaattctcgggtaaccaaggcaatggatgaagctattcacatatgaataatgggtaattatttcatattctctaatatttaattataattcactcaatcactgcttttgcagagttcttaaaagtttacataattttcttcattagttgtgattcaattagataggttatgatttgtttagataatctatgcttaggggatacaattaatatttgagaatatgtttgattatttgtgaattaagaaataaatgattaaaaggctaattagagttatgaaatatttgacatcatccattcatgtgtaatagtggattctagtgtcttggttattcccaatatcttgaaaccaaattttgagttaagttttctttaattcttcagtctaaattcttttgttttcacaaatctcaacgaacctttttactacagctcaattgaaaatcacatcagtcatatttctacaccccttaccgaaggccatcataaaagggaccctcggcggataggtcttaccattgcccctaactttctctctgagagttgttcacgacgtgcgttaggtattgcctcttacattttcatgcgaagtagggtgcaagccgtggattctcagccttcctaggcgaaggtttaagtttccctagaaactgtctacttcgtgaattttatttgcctcataacgcgagatcttatctttttttttttgttatcttgcaagtatgaaaattcatattcatgatacgattcatcaagatttcattgctatccttttgaaaatttgatacattatcaattgaggtttaaaattagtacatttatcttattcctaagacccttcctcgactatcagtgttctttttccatgtgaatgtgttcagattgatatattttcaacttcctcattttcacttcgttcctaatcttgaacaaggtcgaaaataatggcttcctagttgacaacgcatagatgaacgagcgtactaaatcttccgctgaaattcttcctctgagttcctcacaaattacgtcccatctcgccaccagacttcgtaaactttcatttttcctttgctttaacgagaatagtgccgctaactccggttttcatggtttgtttttcgcacatttgttcatcatttctggctgcattccggttgtatttttcgtcattgggatattgtttcttttcccaccggccattattgatttttgcattaggtattgtctttctcgaaattcccttctgctattttatatggcttcttttaggtcttcccgttcattttgttctcctcgtcccttgttttctcgccggtattcgcgacgtccttcaattgctaatgccctttatggagaatattttcctctttgtgcattaccttccgcttttttcccttttagatgatttttcttaataacaagtttctcattttggctttccaacaatatacgctccctcaccaaatcttccttctttcatctttcttcatagagttctttctttaatcgtttcatctcttcttcttcgcaatcccttccttccttatctagagaatcatgtagttcaacgctctcctcggcttcttgtatcgatactttcttgagcttattagtgtttatttttgctcctcctcgtggggttcgtttttccttgatggcgggggtttctttctcattttttgttacgttgctttcttcagttgtttttcccttcttctcctttccgattttctttatttcggcttggcttcccttttctggagtcatctcgcggttcttctcgccgttcgtcgttgttttctccacctcttgtatgtctttctgtggtgcaactagctcttcacttatcccaattgtgaataccatcaaccgctcttctcttctttcttcgcaggccttccttttttgctctatttttttccttattttctcctcacagttatggacatcctttttaatacaatcttgcgtgtctttaagatctccccttatctcgccaattccactcggcataggaaactgtatggcctgatgatatgtagatgcaatcccttttatcccgtgtatccatggtcttcctataagagcattgtaaggtgagtctatgtctatcacgcagactgtgactttcatttccatctcgccagcaaaaatcttttcaactaattctccctttggcttagatgcaacttcgttaaacccatatatgttgtacgtcgatggaacgagatccgagtccttgtatcccatggttctaaatgtatgataaaagagtatatcaaccaagctccccgtatccaccaagattctatcaattgcccatatttttgccttctcggctggatcttcttcccatcttgattatttcccaaaattcagggttataaccaaagggtttttgtgtgaatttcctccttcgggtacatccgttgctgagaacgttatttatcttttctgccattcctccaacggttccttcgtattgatgctgaatatttcgtttcttttgaagtccctcttatgtactctcttgagtatattgtcatggaaatttcggatgctctttgctgcatgtattatcgtattacaattcagcctttgtgttcctcgatctatttcaattcggtataccggctgattgtcacgaggtgtttgcggtacataattttctaggaaatgtgcgagttttacctgctctatcatacgaagtataattcgttgactgtttcgataatcattagtatgatgcccatgaaagcggtgatatctgcagcactcatgactcctagtcacggtggcggttctcttcccaaattaggtggtggtgggatctcctctgttaatactatttcctccgataccttttccacagttgtgttaatcctagggagctttatgtcttcaaaagctggtgcacttggtcttcgctctccaaatctgggcccttggttgtttctttgttgatatcccttgttttagcttcgtggctcataactccttcgtcttgactcctcatatctttgttgatcgatccactcttgatctccgcttgatacagctactaactttgctggtaccggagttgatggatcccccttttcatattttggatcattctccacgacatgaacttcccttggtaatagcctcgaattcccttcttttgctggaattggtactgcttcgctgacttgcatatgcttttcttctagagctatgtactctcttaatttgttcatggttaaagagttgcgaataatgaatatttgagtgtacagcagatcagttgggattaatgcgttcacgaaagctaggatgaaatttttctcgtcaactctttctgcaagctcgctgcataccgtccatcatctcgtcaccaatcctcgtaggatttccatgggtctcctccttaaattgaatagagtctcaatccccggcctcagcatgttgtaagtaatgtaagtggtcaggaatattctctgtaattctttgaacgacgaaattgatctttctggtagcccgtctaaccaagccaatgcttccccagccaagctcgggggaaatatcgacaaagcaccgcatcatttcgtccccattgcatcaacgaaagagtgtattatttcaagtgttgcacaacacttttggacccgctgaatatgctcggaaccgttggcaatacacatttttctgggatgtcagcatacattatctcatacgtaaatgaggatttatcggccttttctattgcttcttccagctgcactctgccgactcttcgcgaattgtttatcaacgtcctcatatctcgcatctcatccaagacttcttggttcatgttccctttgttttcttcccgacggccacctcttatcgcgctgagtcttccttcaccacgtctcttttcttcctcattcttccggttgaattcgcgttgtctttcatcttcttgcctcctctcattttcctcatatcttcgctcttcttcatatctccgcctttgatcttcccaatttgatgtttccaatgcccttctcagttctctttcttcaccgctttctcttcgtcgtctccttcttcgctctcctccgtcttcctcgcgagtatgtctccttcgtcgtaaatcttcttctcctaatggtatcatgtccacctctgaatccgtgacgtcagctgcagcttcctcgtttagttggcgattttgcagaattaatatattccgaggagtcaaagttggataagtgtatcccttagttgctccaacgtcatgtattcttcaccgatattctccttcatttcctcatgagtcatctcttctcctgcaatggtgtccgtgtcggaagtgtgtacagaaccttctctgaagttatcttcgttggcctcctcagtccgttgctggttcacgccttgcctttctcctgtagctgatgttcctcctctttccattcttcctcctcttttggcctccaatcgcttgcttctccttgtcgctatcatgtgttccgctcgatctggtgttctagtcatcaacttatcctagtttcaatatcaattactcttaaaaccctaatcttaaaaggaacttctcgctaagatctctcactcccacaacttcagattctctccactccttagatgaggatgaatccccaatctaagtctgcctgtttctggacgccaaaatgtaactacttgaaatccggtagtacacctaaaaaagaaaacaatcaagatctaagacatgtttaagtaatatgaactaacactacaagaaaaatggggtattgcaacacggcattggtgaggcaacaacccatatttcacgtggctaaatccttttgccacatacaaaaattttgccacacctttattgtagtgcagcaaaagctaggatttttgccacaccaaacggtgaagcaatatcatgaggcaaaaaggtattttgtaatcggaaaatgggtcatttgtccaaatatttttaaatcacagttcaaatggacgagtaaaaaatagtttgggtgaaatggcaaaaaaaaaattagtaacgatgaaaccagtttcatcctaactgaaatttaaaaaatagtgagaatgaaactggatacatcctgtgtaaattaaaaataagaaaatatttttgaaaatgggaacgatgaaactggttacatcctgcctatttttacatttttgtctttttaaacagtatcaaaatataactgtacatttcacctaggaattgttgattttggtctttttaaccaattttgtgttttgtaatttaattttaattaatttgtttcacttttaaaatctgttgataggcttttttttctataaatggaattttatttcagttttttttctctattatattggttattgtgatattacttagatccaaatcttttcttatgatcttttataagattctataccattatcaggaacaaaattttaatacaccaatgtttaacaggaataaaattctctttttggttttatttcatatgcaatttggtatatatatacaatataatttactcaatacattcattacatagattaatgatacatcataatttagagaaaacaaaaaataaaaataaaaatgaaacttcattccgatcttgtagttcattcctgcaaaaacaatgttcaaaggaagataattactatcataattcgaaatcgtacatgtatttctagaagatgaaaattaccttgcaatggaaaatatcccaacaattgattaacaatatccacaagagctgtaaatcaacagattttattaaactagttaaaaaacgaaaaatgaagggaagcaaacaaagatcaaaacactatcaatttaaatctaaagaaacacttaatatattttaatgtaaactaccaaacccgtgaacataaatcaggttacaaataaacaattcgtaaaatcgttgaatactctgtgaattatttcgctaacagtcatcaaaccttaaagaaattaaataatatttccacttagttcttaccaaatcaagttaatcttcttgaaggggaactggtcaacactataattgaataaattaaattctcaagcggcaatgaaaccaaaaattcgaaaacttctttaacaatttgaataccattgattttcaacaaaatatgaagtctttttttggatctcaacccgtaaaagggagaaaaagaaccagagttgttaaagagagaaagagggaatgagaaccggagaagttatatgtagtaaatggtgtatacgtggagttagactttgactcctcggaatatattaattctctttcttttcattttaggaagaataaaaatatattaatacgtttaattctctttctttccattttatgaagaataaaaatatattaatacatttttgccacacgtataacatgaatcgtagcaataaactgtctttttgccgcacaccggaccttgctgcggcaaaagctaaactttttgcgtcaccagtggtttccatgtggctagaaatcagatgtttccacaacatgatataactgtggcaatataaacattttgcaacataccctctagtcggtggtgtggctacaaagtaatttttttgtagtgtaagaaatctttattgatgaattctaaggaaacaaaatacccgttcttgaacacaaggaaaccctaatttcactctctacactaagctctcttctctctctcccaaaatccgccctccatgccttgtccaaggacctttatttataggccaatcaactctaatggggtacaactcattttacttcccaagttctttcgggggtgctttatacttcgccaatccattttccataaaattttctcccttctttcgccatcttcacatgggtttgtcgggacacctatctcttttgttgctccccaatatagttacttcgcgatctatcttttcaaccaagttaccgtacttctcccttttggtttcttcattagaatcttgttgggtactctagcttggtctttcgtaacttatattcttcgtgtaagtctccttgtttctatatgatacttcgcgggattgatcggtgacgaggtaattctgacattcgaattgacaagtcctgactgagatctttaagtgagatttcctaatcatgcttcttccttttgtgttcgacacgtggcgagtctatttcgtgtaccacacacattgtaaaatgagggacaatctcattgctttcttcatgagcaggtaatgctatgattgtagaaatcgttaataattacatacccaattgcgcatcaccatgcaatcgtaaatcattgcccaacgaatctttatgcataagataatgcaggacatgggtgtgtgtgagaccaagagtggtggctaatacgttctcgaaggacaagtgggccaaagtcggcgataattcaacaaatagcgcaatgaaggtagtggtagtggtggtaggatcttcaatctgaatgcagaggtagtaatatttgaaaatagtactaaattactaatcgagatcttcactttatttattttctatgatcaacaaccgattcttactaggtgaattttttcaccgttcttctatcactaactgtcagttatcatatttccatcttatcataaattcaatcttatgtttgtttctaggaactttaggtatggagatatggcctatagaaagtactaaaaagcagttgcttgtgtggatttgattgagatttggtgaagaaaaggattaactttattattaacatgaactgaagtagtggttctcgttcctcagtcgctacattagcttgggaaaataccttagatcgtacaccatttgcccacgtcctcctgctcatgtaggcatggacccaatctaataccttagatcgtaccaagttctgcaacaagaaagatatagaaagtgagaagaacaacaaaaatcagtcctaatcacctaaacaacaaccaaacttcaccatatttcgttgttgttagattatcttgcaacttagaccggcaggttagatcgtagacatcatcaggttaaaactggtagggtaagcagtggttgctcagacccttcgttgaaaaaacactagtcatttattcattagacatcgagtgaaatatagatataagtaaggcatatccacttgagagaaacaaagagacctgaaagattgatatatgatctgaagatctgacaagaaagttcatcaaatatagagttcatggagacaccaatacttatcaagctaggcaatggtttgtcaataccaagtgttcaggaattggctaaactcacgcttgcagaaattccatctcgatacacatgcaccggtgaaagcccgttgaataatattggtgcgtctgtaacagatgatgaaacagttcctgtcatcgatttgcaaaatttactatctccagaacccgtagttggaaagttagaattggataagcttcattctgcttgcaaagaatggggtttctttcaggtatacaaattttgattatacgtagttgattgacgactatttagtgttttactagttcatgctaatctgctttatgtttcagctggttaaccatggagtcgacgctttactgatggacaatataaaatcagaaattaaaggtttctttaaccttccaatgaatgagaaaactaaatacggacagcaagatggagattttgaaggatttggacaaccctatattgaatcggaggaccaaagacttgattggactgaagtgtttagcatgttaagtcttcctctccatttaaggaagcctcatttgtttccagaactccctctgcctttcaggttattgtttctctccgtttgctttttctcaatgccgcacgtgatattttttttttttaatgttattttggttggttcagaatagtttcatcaatatcgtctaggttgctaggataaaccatggaaaatcctgtctaggttgcctaaaattcacattcggaggcagtatcaagcaatccgggtttgtgaattgcatggtttccaaaatatatcgaatccaaacatcatgcatccctaaaatctgtcagatggaaaatatactgaagttgcatttgatccctaatttacatcctttatgcagggagacactggaatcctacctatcaaaaatgaaaaaactatcaacggttgtctttgagatgttggaaaaatctctacaattagttgagattaaaggtatgacagacttatttgaagatgggttgcaaacaatgaggatgaactattatcctccttgtcctcgaccagagcttgtacttggtcttacgtcacactcggattttagcggtttgacaattctccttcaacttaatgaagttgaaggattacaaataagaaaagaagagaggtggatttcaatcaaacctctacctgatgcgttcatagtgaatgttggagacattttggaggtatttaggctaagggcatatatggcctgcctactggtccttgttgtgagtacctgttttgactgtaccccgaaaagttgcttagttacttaatgtttcccttttacagataatgactaatgggatttaccgtagcgtcgagcaccgggcagtagtaaactcaacaaaggagaggctctcaatcgcgacatttcatgactctaaactagagtcagaaataggcccaatttcnagcttggtcacaccagagacacctgctttgttcaaaagaggtaggtatgaggatattttgaaggaaaatctttcaaggaagcttgatggaaaatcatttctcgactacatgaggatgtgagaaagtgtgaacatatattatactccacattgtgtttaatatatgatgaaataagttgcttttgaagtatgatgaaataagttggttttgaagaattcatattgtgcttaaatttcgtggatgactgagagatttattatgtaataataatgtattggtttgaagattctcgtctcactatatgtaagactctgtttgggtcaagtgatgtaatcacggttgaaataagttgcttttgaagaattcatatggtgcttaatttattatgtaataaataatgtattggattgaagattgtcttctcattttctgttaagtctctgttaggctagggtacgttggttggtttctcatgctacttgttgtgtttatcgctctaatcttgatcccattgcttctaaaacagctactaaaggaaggcttggtggtggtgcttagaggtgtaaattgggttgtaccagcaccagcacaatctagcacaacacgctaaaatctgaggccatatcagcatgtgatttagtccagcacgacccaacatgttaatttcgtgggttgtgctggcttaacctaattggcacagtagcacagtacacgacactgtctggattttgagttgtcgactaaattaaagattcgtacagaaagaattttcatttcgtctcaactttatgatacttttgcgtgtataatttcggtaatgatattctccactcttctcgcagttctattctcctctcgcgctgatgcggcgagtccaccgtgtacaagtgacaaaactttactaaaaaaataaaaataaaaaactcaaggttcacatgactcatttttttttccagcaaaacatatcggcttctgtttcccttatctcttctctattttcagttaagttataaaggaaaaaaaaaatctaaacacgaattttttcatcatttctgtgaaacatttatgtagttgcggaaaatcccacaactagacccttgtattgataataacattaagtctaagtcattttgatcaactcaaacgttaatgatattattcagcactttgacacttatatgatcttctcaatctcttgataatgaatatgtattgttcttactgtagattcaacgtagatttcacatacaacaattgaggaatacaagatgaaagccaaatttaaagatgaaattcatttctttatttcttataatttccttagctatctctctcttaatcgacccctctctctctgttagatttctaagtccttatacaggaaaacttatcaatagaagacaatcatgattcacgtccaagatctcagttgactgattctatttcagtttgtcttatgcgccagacttttgagaaggtatgaatgtgcatcgtgttgtctgttgtatctttcatggtactcctttgaatatggtctccgtgctatctttatcacttgattatcttctcgcaatcttgtcttattgtcgcacgactattcttcgccatgtcttctaattattataatatcttcgtgcttggagttgttttatctagagcgaagttgtgtgttcgccttgtgcaatatttagaccctacattttgcttcttgtcgcgttgttcttatgcaagtagaataatgcgagaattcttggtcaaacttcgcatcagtcctgttttttcatcttctttgtattacccgacacacttatgtattttccgcgtaactgctacacgtgttgaaagttttttcttttcaagcgacacgtctttacttctttttatcggataaatactcaggagagagaaaaaaatattttattttctaccgtcttcctcctctgttcaacttcttcttcttccgtactttgtcttcttcctccgtgttcttcaacttcgcctatgtttccatggcagatcaaaatacgtctgctcccactgttgtttttgctacatcatcttatcggtgagttaattttgcctcagttattttcattttgcgtttcttacgacatgactataatttctgtgatttttccttttccattgttatcgtattccaagctttgttatgttattcaatttcagtattccaatgtttattcccatactaatcatgcagttcgaaaccaaaatccggtaagaagaccgcagaaagttttgaaacttttcaagtagaacttaaaaagagtggtttcattctctcagttccagaggattcttctgccactaccctgttagacgaggagaggattcaaagagaaccatggagcgcgactcgcatgcctatcatttctgaagaattcatattgtgcttaaatttcgtggatgactgagagatttattatgtaataataatgtattggtctgaagattctcgtctcattatatgttaagactctgtttgggtcaagtgatgtaatcacggttgaaataagttgcttttgaagaattcatatggtgcttaatttatcggaaaattggtcatttgtccaaatatttttaaaacatggttcaaatggacgagtaaaaattattatgggtgaaacggacaccaaaaaaatagcaaggataaaactggattcatcctgacttaaacttaaaaaatagtaaggatgaaactggatgcatcctgatataaattaaaaataagaaaaagtatttgaaaatgggtaggatgaaactgtttatatcctggctatttttacatttttgtccatttaaacagtatcaaaatctaaatgtccttttcacctaggaattgttgattttggtctttttaaccaattttgtgttaacttattatgtaataaataatgtattggattgaagattgtcatctcattttctgttaagtctctaataatcaaaaggatgagtttaggattaaggacaccattcttttggacggtgtgacatatcagtgttataacaatgatgcttatgaaaaatgttttaattctgaggaaactatagttaactccaacgacttaaagacattacactctatctataaggtttcctttaatcatctttattgtgatattcatattgattccttggttgatgatgattatgatgatgatttagtacagggtcacaaacccagtggagaagttcatatacttagaattgttagcacaacttttcggaagattcctaattttggattagaattgcgtccttttccggtattactagattattttgcatcccgtgacttctctttccctgtgcatgtctcccaaatggtttcagttctcacccacaacgaaccacttgagtcggtaattcttgttactgacgatttatcctttgcaaaaacaaggtatgtgggcagctctttccttttgataatctctatatctttacgttgctacaacggagatctgaggttatcactagttgtatatattgttctttgggttgatcccgcaactatttaggttgttgatatatggagaatcctttatgcatattccagtaggtaattctattttcttattttatttttatttgtttattttcggatataatgaatttcccatcttaaattttatgttggatgatttaattacattgaggacaatgtaatgtttaagtgtggggagtggttaactttttcttttttctttttcaggaattttcttgcaatttatgaccagttgtggagcgggtctattgtaggtttgcaggtatattatgaccagctgtgtagcgggtctaaaattttttttttaaaaagatgatcagctgtgtagcaggtcttaaaaaaaattaaaaaaattaattatcatcacggtttttagggttatgaccagctgtgtagcggatcttgtgtatggtatttgtcatgaccagctgtgtagcgggtcttttgtagggtattttctatgaccagctgtgtagcgggtcttgtgtatgatatttcaaattttcattttatgaccaggtgtgtagcgggtctaatttcctcttatgatgtgactatctgtgtagcgggtcttctcctattttgctcgaggactagcaaaatataagtgtgggggtgttgcacgtaagtgctatattttatacccatatttatattagttaggactcgatattttggctaataatactattttagtgcttttgtagaaagtacaagtgaattcggtcatcatggaaattaatgcctaagctgtagcttaattgacgtttgcgactacaacagccaaagctgcttctcactggcaccaaaagggaacttctcaattaactgtgactgccaagtaaacaaagccggttgccgcaccaataaccatttcatatgcagaaaccaaaggtgggactaagaagttgttgctttgtacaagcaagcgcgtgaaactccactacacacgagatgctgaagttctgagcacatttgtgcacttcttgacaaaagggagttcacactattgcggcctgcactatatttttctaagccttttcttcttattacttgaattttgaccaagaacataaagtaaaatattatttcttctggaactgtagtgtctcaaagaaaaagttagggtctgtgtatatttgagttgtcgttggaattgatcgagaatggagctgctggcagatggatgaacagcaagggagcagctgctgtgtggccgagactgacaaagtttacaagtcaggttggtgctatggccgagactgccatcacacggatgatggcagaatcttttgatgggttcgtgggcagaggagatactgatgacgagaacacagaatgggacaggagcacccggtattgacgattcaaggtgtcgattgttcgcagtacattacagattcaattgcaatattcttgcagccaagttaggagttcaaatcagtaaagccggtgatgagtctgagaaggagctgaagttggacggacaaacaggcagtagatgtactttggtgatgaatgaactggtgctgtagccattagcttgtggctgtgtactcgaatggagatgaaagcaagctttggctttaactgttagtgctcaagaagtgttgttgcaggtggcatcgatgagcggttggtttgagagtaaaaaggtaaggatggttgcatggagaacttggacgtgagttagatggtttatatgagctgttgatgatgttggcagagttgagaccatgatgcgagattgggatttcaagctggagttcgtggtagtagtgatcagtggtgctgtggccaactatggaatgaaactgaatttcattgatgttcttgagctgaagaaatggagatggaaaggatcagaacaaaggcatgaaaaaagatcgtgtgttggttgaatgaattctgtgtgtggggttttggttcgagtagattggtgacgatttgaacagaaagttctgctgtaaccggggctggagttgttgctatgtcgaagcctgtttaagccgtgagccagtggatgcgaagacgtgagtcgaaacaggaagaagaagatatgggctgtatgaatcgattcaatctggagtagcttcgggtgttataacaaccagtggtgatgttccaatggtcggagtcttgaaagggctagaaaataaaaagcggatttgggtttataattggataattttgcttattaggctggactttggtgagtgctggcatggatcgtaagaggaggaactggatttctataaagagctagctacacagacagacaaagggagagacaggactggaggtagcggctacaagccaaaaccaggaaacgagaagagaggacgactgcgataaaaggattacggtttgaagtttcattgttcgcatcaattttgttttatttgtgcttctcttttatatgtcatggcttttgagaaagccatgtattgctagatttgtgtaactaggatttatgttgaaaccacttggagttttaggctattttgatttgaataatattgagcaatgactattatggtttgatttgattaattccatgatcatatttattgattaatcaaaatatgggttgttgcttcaccggttttgtataacctttgtgcataattgttaggataacaaatatatttgtctacttatttgatattccatgctgggttatatcttttgatggggtatacttagaatagctaggcattatttgtaaacatataattagtttcgtataaatttctcgctaatgcaatttgatggtgcatgcttcggtttagtcttttgatgtgccattcttagggcgtcctaatgatatttgcgattctaatacatataataggtaatgtcaatagaacgaacaataaataattcatgaattatgtttcatttcagtttttgaatagaaatagtggtggaaactgtaaaccctggttaccaactttctcatttatattattttattagtttaattttattatttcattttacatttcacaattataaaaatctcaaaaacatcatttctgattattagagatattgattacagtatttccaccgctccttgtgggaacgacccgtacttgcctctgtctgctagttggacaccgtgcgattgaggttattataatataggcatatccggagcccatcaattcttggcgccgctgccggggagtggttgtggtatattgtaattggtattttgtacataacttatttttcttttatttttatattttcttttagttctttttacgtagcttttgattttttcctaggtaccttagtctgaagagcggcgattggagtcaacaacgggcttaaagtaagtactcgatattctcacaaagcttttgcaaggtgagttgttgggaaaactttactttgtatattggtttctagtgagttgacttcttttatacctttttggaatcttaccaaaagagttgagacagaggagtcatttgatatttcacctgaggagtatgcatatgcaccttctcattatcaagaacctgccgagtgtgtaaataatgattggaattatttgcataggtatgatcattccagaccttgtgaaggttatgatcattaccaaccttaccctggttatgagccacaatttgttgattccaattattattcacagatttctccgtcacagtatgagagagatgatcaatcttactgtgacccatcggcatcacaactatctttgctagaacgcctcaatattgaaattgctgaacagaccaaagttaatgagttattttttgttgagctgagtaaaacccgagcttatattgctgaactttctgaagaaactgattgatcgattgctaaactaatgcagtcggtaaaagatcgtggtattactgaggatacaagttataattttccttatactcttgatatttatgatgaaaccgctttaactaatgaatcaatgtgtatggataatgatggtaaacttgatagttgtgatcataggaatagagacattgtcataccaagtgaaggtggtgtatttagtccaactcctgatcgtgttaatgatcactcgcctattcaaaaggatgagtttaggattgaggacaccattcttttatacggtgtgacaaattagtgttataaaaatgatgcctatgaagaatgttttaattcggatgaaactgtagttaagtccaacgacttagagagattgcactctatttataaggtttcctttaatcatctttattgtgatattcatattgattccttggttgatgattattatggtgatgatttagtacagggtcacaaacccagtggagaagttcatatacctagaattgttagcacaacttttcggaagattcctaattttggattagaaatgcgtcattctccgtattactagattattttgcatctcgtgacttctcttttcctgtgcatgtctcccaaatggtttcagttctcacccacaacgaaccacttgagtcggtaattcttgttactgacgatttatcagttgcaaaaacaaggtatgtgggcagctctttccttttgataatctctatatctttacgttgctacaacggagatctgagtttatcactagttgtatatattgttctttgggttgatcccaactatttaggttgttgatatatggagaatcctttatgtatattccagtaggtaattctattttcttattttatttttatttgttttttttcgcatataatgaatttcccatcttaaattttatgttggatgattcaattacattgaggacaatgtaatgtttaagtgtgggggagtggttaactttttcatttttctttttcaggaattttcttgtaatttatgactagccgtggagcgggtctattgtaggtttacaggtatattatgaccagctgtgtagcgggtctaaaaaacaaatttaaaaaagatgatcagctgtgtaacgagtcttaaaaaattaattatcaccatggtttttagcgttatgaccagctttgtagagggtcttgtgtatggtatttgtcatgaatagctgtgtagcgggtcttttgtagggtattttctatgaccagctgtgtagcgggtctaattctctcttatgatgtgaccagctgtgtagcgggtcttcttctgttttgttcgaggactaacaaaatataagtgtgggggtgttgataagcacgtaagtactatattttatattcatatttatattagataggactcgatattttggctaacaatattattttaatgcttttatagtaagtacaagtgagttcggtcatcatggaaattaatgcctaaggtgtagcttaattgacgtttgcgactacaacaacaaaagttgcttctcacttgcaccaaaagggaacttctcaattaactgtgactgccaagtaaacaaagccggttgccgcaccaataacatttcatatccagaaaccaaacgtgggactaagaagttgttgctttgtataagcaagcgcgtgaaactccactacacacgagatgctgaagttctgagcacatttgtgcacttcttgacaaaagggagttcacactattgtggcctacgctatatttgtctaagccttttcttcttatcactcgaattttgaccaagagcatcaagtaaaatattatttcttctggaactaaagtgtctcacagaagaagttagggtctgtgtattatttgagttgtcgttggaattgatcgagaatggagctgctggcagatggatgaacagcaagggagcagctgttgtgtggctgagactgacaaagtttacaagtcaggttggtgctatggccgaaactgccatcacacggatgatggcagaatcttttgatggtttcgtggcagaggagatactgatgacgagaacacagaatggaacaggagcaaccggtattgatgattcaaggtgtcgatttttcgcagtacattacagattcaattgcaatattcttgcagccaagttaggagttcaaatcagtaaagccggtgatgagtctgagaaggatctgaagttggacggacaaacaggcagtagatgtactttggtgatgaatggatggttgcaggcgacgggagttggctgaatgaactggtgctgtagccattagcttgtggctgtgtactcgaatggagatgaaagcaagctttggctttaactgttagtgctcaagaagtgttgttgcaggtggcatcgatgagcagttggtttgagagtaaaaaggtaaggatggttgcatggagaacttggacgtgagttagatgatttatatgagctgttgatgatgttggcagagttgagaccatgatgcgagattgggatttcaagctggagttcgtggtagtagtgatcagtggtgctgtggccaactatggaatgaaactgaatttcattgatgttcttgagctgaagaagtggagatggaaaggatcagaacaaaggcatgaaaacagatcgtgcgttggttgaatgaattctgtgtgtggggttttggtccgagtagattggtgacgatttgaacagaaatttctgctgtaaccggggctggagttgttgctatgtcgaagcctgtttaagccatgagccgatggatgccaagacgtgagtcgaaacagtaagaagaagatatgggctgtatgaatggtcaaaagcgacagactgtaaatctgtaggagtttttcctacgtaggttcgaaatctatttacggatctatatgcttcgattggaacagggattcaatctggagtagcttcgggtgttataacaaccagtggtgatgttccaatggtcggagtcttgaaagggctagaaaataaaaagcggagctgggtttataattggataactgtgcttattgggccggactttggtgagtgctggcatggatcgtaagaggaggaactggatttctataaagagctagctacacagacagacaaagggagagaccggactggaggtagcggctccaagccaaaaccaggaaacgagcagagaggacgactgcgataaaagtattacggtttgaagtttcattgttcgcatccattttggtttatttgtgcttctcttttatatgtttatgtaatgtggaacaaggtaaaagaaagcaatactagattcctataagcaagaagagaagagaattcaagcaagaagagaaaaataagttttgtgtttaataatttgattgagaaatagatagctcttacaagacttaatctagcctttatataggcttgaagaataactaaactaggaaacagaaaactaaaaggaaatctaaaagaatcctaaaaataagaaagactgaaactaggaaaccatggaagccaaacctctaagcggaatcttctggaattgtagtatgccctgcatcagtccccccttctagagtaaagctcgtcctcgagttgtccaaacaaaccagaagttcattgtcaccatgaaacgtaaaaatctcttgaacattaaatgtgttggagatattccaatcatttggtagatcaataacataagcattatcattgatcttctttaaaaccttgaaaggaccatatttcttcatcttggttttgttataagtacccactgaaatcatctcttttcttagatgtatcatcacgaactccccttccttgaaggttttaaacctcttgtgtttatcagcatcctctttatatttagaattggacttctccagtttagattttacttcatcatgtaattcagttgctttgtcaacaaaagagtcggctgcaatgtttgtactctgtgtggtgggtaagactaccaaatcaagagtatgattaggtactttagagtaaacaatctcaaatggagttttcccagtagaaagattcacagaagtgttgaaagcgaattccatatgtggcaataacacatcccactgcttactattatccaggcacttagctctaatcaatttcccaagtgatctattaacaacctcagtctgtccatcagtttgtggatgtgaagttgtgatgaattgtagaactgtgcctaagcgcatccataaacttttccagaaataactcaaaaatttggtatctctgtcagaagtgatagactttggaaccccatgcaatcttactacttctttaaagaacaaagaagcaacattagaagcgtcagttgatttcttacaagccacgaagtgagccattttagagtaacgatcaactacgaccataaaagaatcattacctctagcagtacgaggtaaaccaagcataaaatccatacttatatcaacccaaggtgcatcaggaactggtaaaggagtatacaacccggtattttgaattgtacccttttctctctgacagatcatgcatttttgtacgaacttttgtacatcacgtttcaaagatggccagaaatatctttcttcaatcagggcaatggttttatctctcccaaaatgaccaccaagaccactgccatgtaattctcgcataagatgtaaacgtaaagacccttgaggaatacataatcgattctctttaaaaagaaaaccttcttgtataagaaaatcatcaaccccatgagtttgagaactgcattgatcccatagtttgccaaaatcttcatcttctggataaatgtctttgatatagtcaaatgcataactctcattacgaattgtagttaatagatgatttcttctacttaaggcatcaacaacttgattcaattttccacttttatgtctcacggagaaagtgtatttgttgagtgtggaaagccatcgatcatgcattctgttaactttagcagaagtattcaaaaacttcaaagcatggttgtcagtgttgacaacaaattccctatgtataagataagtatgccactgcttaagagattgaacaagatccaataactctaattcatatgtagaccatttcttttgtgcatctgaattcttctcattgtaatatgcaattggatgaccctcttgtgataatactgcaccaataccaacaacagatgcatcacaatctatttcaaaaggcttgttgaaattcggaagtgcaagaattggtgtcgtacaaagcttttctttaagaagaataaagcttttatccatttcttccgtccactcaaacttctccttcttgagacagtcagtcaaaggtgcataaatagagctaaagttcttcacaaatcttcgatagaaagaagccaaaccataaaaactacgaacatcacgaatagaagtaggaactggccaatcttcaattgcttgaactttagaaggattgacatgaataccatcagtagaaatcacatatcccaaaaatgttactgaagaagccataaaggtacacttcttcaaattaacatataaagagttgtcagcaagaacttgaaacacttgtgaaagatgttggaggtgttctggctcactgcgactaaaaattagtatgtcatcaaaatagacaataacaaatttactgagaaagggttggagaacctgattcattaggcgcataaaagtactaggtgcattagataacccaaatggcatgaccagcaattcatataaacctttacgtgtcttgaatgttgttttccactcatctccacctcgaatgcgtatttggtggtaaccactgcgtaaatccaacttagtaaaaataatagagcccgacagtaaatcaatcatatcatcaatacgctggatcggaaatctataaggaatggtgatgcgatttaatgctctgcaatcgatacacatcctccatccattgtcttttttactaaccaagaaggcatgactggcacaaggactgttgctaggtcgtatcaaaccctttgtaagcaaatcatttacctgtccctgtaatatctcatgctcagcaggactcaagcgatagtgtgcttggtttagtaaagaggctccaggaataaaatcgatgcagtgttgaatattccgtaaaggaggtaatccagttggtagttcatctggaaataaaacattatattgaaataataagggattcacctttgcaggaaactcaatcataggcttagaatcttcatgggaatgtaaagaatgttgtgggtacaaagaacgaataatagtgtctacgacagcatcagtctgcgcacaatagtttgaagtggaattggatggacgaagaaccttggttttcccgttatgaacaaaagtgtaagtattctcgaatccattgtgaaccgcgtgaagatcgtattgccaaggtatgccaagaagaagatgggttgccgtcatattaatgacatcacatagacctgtgtcttcataaccctcaaaagagaatgacacataacactgaagagtaatcttatgtgtgctagaggaattaacccatcctacagtgtaaggttctggatgagaatttactggtagttcaagcttcttaactacgtgatcatgaatataattatccacactgccactatcaattatcatcttgcagattttacccccagtataacatattgatttaaaaatactgtgtctctgagacttgcattgttgagtaagaaataatggacgaatcatcccaacaaactcgtcgtcatcaccaggtgagtcttcatcttcgaactcattaagcgcaccagtgacttcattaatgaactgaggttcaccaatcaaagcatttaatttccgaaaatcactagaagtgtgccccgattgctgacatttattgcacttatctccacgaaattttgtataagcattattagctagctgttgcggtggaaattgttgttgcctgttatgaaaccgatcccctgtagtaggaggagttggttgcagagagtgagactgctgacccggctgaagatcaactggattggctaagataggtgtagccagaggtggagtataaggcacaatatggctaggttttcgatgtgaatggctaacatcatcataaggtggcctgggaatattcaaaacagtatctggagaaaagttttgagatgaattggtacccctgtaagtattttgataacgcccttgtctggatggataaatcctagaagaacgaataagacgattttctatcttaatagcttgctgcacagcttcgaccatagtaaaaactgaatgactcataccattttgtattactctaatcagtccctcaatgaatcttgcaactaactgttcttcagattctttgagttgattttgtgcgaccaaattataaaaatctgacacatattcttcaacagtttgttccccctgctgaatgttttgtaatttgatgaaaagttgctgcttaaagtctctaggtaagaacttatccctgatcaaagttttcatacgtttccaagtacgtattttcggtttgttagcgtttctacgatcatcacagatcttatcccaccaagctgcagctcctcctttgagtttgtatgtcacaagtttaaccttagaatctccagggacctccatgaattcgaaaaaagcttctacctcaaagaaccaatcagttagttcttcaatacgaaaatttccagagaagttgggaatatcagcttttagtttatattctggtaaagatttgtaagggttgtgaccagtttttaaacgtcgttcttcaatccaattcttctctagatcgttctcacgttcatcttcatcatcagtgtcaagtgaaggagaaactatcttcttctttgaatgacctatgaaaccttcatacggtttcttaatgtttaaagtacgcaatgcatcttcaggtacttcatcattctgtaaaaactgaagtatatcttctttagtttttccttctaagtctacaagctcaggcatatccaaatctagatttatatgttttgcaaccttcaaaagttgattctgcatggtttcaagcttggtatctcttaaccctaatttgtcctccatggactactcaagagcttcagtaatgttttttgccaaaatctcattatgagatttgatgagagcttcgattgctgctagagtaactggttgagcagtcatatttttgtttttgtttttttttttttttttttttttttttgtttttgttttttgttttttttttttgtatacgaaaaggaactaaaaaaaaaggactgaaaggtgttgcggaagtgatgtaaaggatcaagttatatgatgaaaacctaaaactaagcggttgataccaactaatgtggaacaaggtaaaagaaagcaatactagattgctataagcaagaagagaagagaattcaagcaagaagagaagagaattcaagcaagaagagaaaaataagtttcgtgtttaataatttgattgagtaatagatagctcttacaagacttaatctagcctttatataggcttgaagaataactaaactagttaacagaaaactaaaaggaaatctaaaataatcctaaaaataagaaagactgaaactaggaaaccatggaagccaaacttctaagcggaatctactggaattgtagtatgccctgcatcattatggcttatgagaaatccatgtattgctagatttgtgtaactaggatttatgttgaaaccacttggagttttaggctattttgatttgaataatattgagcaatgactattatggtttgatttgattaattccatgatcatatttattgattaatcaaaatatgggttgttgcttcaccggttttgtataacctttgtgcataattgttaggataacaaatatatttgtctacttatttgatattccatgctgggttatatcttttgatggggtatacttagaatagctaggaattatttgtaaacatataattagtttcgtataaatttctcgctaatgcaatttgatggtgcatgcttcggtttagtcttttgatgtgctattcttagggcgtcctagtgatatttgcgattctaatacatataataggtaatgtcaatagaacgaaaaataaataattcatgaattatgtttcatttcagtttttgaatagaaatagtggtggaaactgtaaaccctggttaccaactttctcagtgatattattttattagtttaattttattatttcattttacatttcaaaattataaaaatctcaaaaacatcatttatgattattagagatattgattacagtatttccaccgctcctcgtgggaacgacccgtacttgcctctgtctgctagttggacaccgtgcgattgcggttattataatataggcatctccagagcctatcactcatatatcacttagaaagtctatttatactctatctcctatttgagacaaaagtcgtatagctatatagtattcgatttatacacatttgatatttcgagctgggtttaactcgcttacatatttctcgaaatatgtgttggtaagttttcactttaaccaagttcatcttatattcttgacgaaagtcaaaagatgatcttgtgaaagccgactggtaacatcttatatgatttgtgtgagacagtcatttgatgtagactcggaatgtttcctattgatcattcgatcacttgaaagtttctttgattctaatagtttgtgtgagataggtattgtcttcttctaagaatgtttcaatgattgaattggagtttagaacacttaaccataattggattataaacatagtatgtgtacttgcatatgtattgatccaagaccggtgtagtatgcatacacgtatgcgtactggcaaggtcaggcaaagtccgggagctagagtatgcttacatgtacacgtactggagaagtcagttaaagtccggatactatagtatgcgtgcctgtatgcgtactgggttcaactgaagtttggatgtgtgacagtatgcgtacccgtttacgtactgtcgaacacagtccaagtccggctacttaggtatgcgtacccatttgcctacttgagcgggttatgttctagctagaatcggttgtgccacgaactaatatatttatataataaggaatgcaatctcttgcaaaaccgtggctataatgttcatgaattgattcgagtgaaataaacaattgaacaactttataactagtttcatttgagtcatttgaactagttttggttaagatgaataaggttgatacgaaagtgtttatatggataacttcggttaactattgttgagccaacttggtgtacacatataggtacggttacccatatctaaatgaagatacattttatttgtgtgtaacaagctaagttcgatctaacagttgaaagatattatcttgaatctaatcaggaattcatctaacggtgaatattgtttgctttgttccaaagctatcaaacgctgatttgcagactatataagggagaactctagctactgggaaacctaatccccacacctcatgtgtgatactagttgcgactagagtcaattctcctttaatgttaggatttttttcaaaaccttgtaggttaacgactcaaaggcttcattgggattgtgaagccagacccaactatctgtagttgcgtgttctgatcttaatttatactatcgtgactgagtactatcttctctaagattttctcgagatttatctccgatgggtaagattaaaagaagtcacaaacatcttcgtctcatcgtttgtgattccacaatatcttgtttcgcttccatacaattaacattattgtgaggtgattgataatacttggttgttgggaatataagtctggtttatcaattggttcatgtgcaccttgatttatcataagacggaacaaaactcatatgtatttttgtgagagacagatttatctatctcaatggacctttctgtgtgagacaaatttgtttatcaagtcttcgactttgggtcgtagcaaatcttagttgtaggtgagatcagcaaagggaatcaagtacgtagaatcctgttggggttcagagacgtaagaaccgcaactgtacctttatcagtgtgagattggtttgggctcaactacattccagtccgaagttcattgttagtagcctagtgtgtgtagcggcttaatacagtgtggcgttcaaagctggactaggtccctggatttttctgcatttgcggtttcctcgttaacaaaattatgatgtctgtgttatttcttttccacattatattctctatataattgaaatatcacaggttgtgcgtaagttcaatcaatttcttgaatccttcctttaagttgttgattgacatgattgacacttggatattggtttgtgataccatccaagttatttttcttattcaatcgggctcaaaaattcctatttgtttgattgcagattgtattgagaaattgagatataactctttgatatatttttccaaagattgagtctgactgtctagttgattctcttgaaagtatatttttgttagtccatacagattaccgaaacgaaatatttggtgtggttgttagacccccgccttttcaattggtatcaaagcaggcaaacatgtttaagacctcatcagttgtgtttgtaacaatctgaatctatggacagaagtgctatctccataaacgcaccaccagatcttgggatttctgaattcttatccataactgatttaattaaatctgtagaagaaattccatctattaggttttaaaatcccttgaagtgttttcagggcttgaaaaaaacttgaaatcttatctcttgatgttgagttataccaccagaacgaacaagttaacacaagagaaggggacttaccaaagactcaatggcaagttgaaaatctagagtcaaggcagaggcaactccacgaagagattcatgatttgatgaaggagtttcacaaattttaaccaccgcatcacacgcacgagttagtactggattattaacagttgacaaagggttagtgaaaagatcatagaggatcgccatggcagaggcagaatcatcaggagaaagcaaagcatcgtcgcgagaacaagtattcacaggaacatgagaagacctcttacttttcttgaaacaacgtctttatttttacctttcgcctttgaagatggaagaaactcattattggaacaaacaacgtcctcaggcttaacctacacgctccatgttagataagaaacagaggcaacaatattgttaaaaggaaatgacagctggaatagctcagttggttagagattgtggatgttaaccacaaggtcacaggttcaatccctatttatagcgccaaaatgtagttggaggaaatcctacactaacacccaagtaaaatctaagaaatggatctaaaacatcgtgaagaaaaatctaaatcattttattgaaagatagaataagtacaatatggacgtatgaaaacctaacttggagaactaaataattttctctctcctaaaattcttatttcacctctcaaaaggatctctcccttcaatagttgtttctggtcccttttataggggttacatagtggaggacagttaataaagcccattttttgggatttgagagggtgttataatcgccctttattctatttgcagtgctcatcttttaactattgcgttattcttcacatttttggtgtgacttagtgacgtcatgccgtccgtcagcagaaatgtaatgagcgcgtcatattttccttctaccaaatgcattcttccgccttcctattgggtatgcggtattttgcacccatacgcttacgagattgaaacaagggttagtatattaaatcgtaaaaacagatcatctttaaaggagaaaaaattccccccgaccccgaattaaacaagggatttatgatagtcgtcagaattccctctgatttttcaatctttttcgttagctatgacttttattggctctaaacaaacacactgcgttggatatacgaatacggatttgcaaatcaatcaatggaggccataattttcgtaaagaaccgatacaacgactaaacgaataagaatatgactatatgagtggaggaacacgattatcattcattgaccatcatacacacataggtgatgctggtggtggagttgtgtgggagatgtgtatgcggtttatgtaggtgtatttagtagggttgtttggtccgagttagataaatatattaactaggtcctagttggcgagtcaattacgattttcgttttgttcggatcctcttttcctctccctctaacaaaaatcttcttttttggttgaataataccgaacgactttcaattgtgtccatgtccagccaaaaaaaatcactatgatgggagcaatatattttaaaagagcacgaagaaatcataaggaagaaatagataaaatataagatatgaggaaaataggaaaagatcaataattcacgtagaaaagaataacatattcatattaacgtacaaaggacacatttatttttgcataaaattggtcaaaaagaccaaaacagaaaattcatgggtgaaatagatttttagctttagatactgtttatataccaaaaaattgaaaaatactgttcatttagccaaaatggatatttgacccaggaaaataaaaacaaaaaaatatcaatcacctaaaataccccttgaccctttaaactaagttttttatagcaaacaaatttgtcccacgtacaaatttaatctaacatcaatatcccaaaatctttgagtattcgtgcggcaccaacaataccaaatctgaaagaaaaaaaaaatatttcgaggttgagtcactgagtcagaagaaagtcagcaacttcaactttcacagctagctgcaacttcaactttcactgcatccaactgctccaccatgaacacacatgacttatttaatcatattttcagaagcacttggactcataacagctgcatcttccccagctcctcaaacacatttcatttcctccataccgagtacatttctccttgttgtctctctaaattaaatattattatataatgtgtgatgtgcttgtctaagcagtagctgcagtactgtatggtactattcccacatgaaacacttggtccctggctacatagttggtctagctagctagccactgtactgtatgcatgacacatgtattgaatcaacttcatgagcccctagcggttggtttctctatacaatgagttgactatttctacccgcacactactttgatcaataattcatgaagattatcaatcaacacacactaatcctacattgataaacgcgtcaagtcaatttcaaagccattaccatcatcgtcctatcaataacgataatagtattactgcaatatacaatgtatgcagaaagaaaaggatagctaagaaagaaaatgatgattaactagcctaccaaaatataccaagagccaaggtttagttatggacacagtaactgtgtatctaaaagataaaacatgacatacctttttcagcagacaacaaaacaaagttaacagctcttgcctttcaaaggatacaactatattctttctttctctccttaagatccttctttccctaccacaagaaaatagaccaaatggtataaatgagaaagcaagtttgaagagatagaggcttagagctagctgttatagccaggtaatgcagcagaaaaagagagtactacttctaaattactaaattaaaggtagaaaacatgacaatatggtgctggatttaaattcagtttgcaaaaaatgtgatcctattgctaaaactatgataaaatatgacgaaaccaggtttcatcctagttgaaacatgtgtgaaacgaaatccaacctaatgcaaaactggatgaaaactagtttcagctagtttaagcatgggtgaaatcaaattcaacctaatctacaataagatgaaaaccagtttcatcctagtttaaacatgggtgaaaccagtttcatcatagtccaaccataggctaaggaaaattcaatacaatttataacataaagaaatcattatcaacctagttttaaacatatgacaaccacgacaagagataaataaaagacaatattttgctttatttagccactgcaaattgatagtcattttgatttcatagcttggtgcatgtgttttaggcctactaccgcaacgttctggaaaaaaaattcaatgcatatatatactaaatgccagacaggggatcgattatatgtacatttaattactagtcaagcattcgtcaaaatgaatatatattttttttatagatgacaatgcaaaagtgcagctggataaccatattcaaatcaatctaaaacaggatgaaaactgatttcatcctagtttaaacatgagcgaaatcaaattcgaatcaatctaaaataggatgaaaccagtttcatcccaatccaaaacagaatgaaatcagtttcatcctggtttaaaaatggttaaaacaaaatgcatcccaaacttaaacatgaatgaaatcatcatcatcctatataaacgtggattaaaccaaattacactcaatctacaggatggaactggtttcatcccagtttaatcatccgtgcaaccaaatattcaactcaatccaaaaacaaaatcaactaattaataattcaattagcaaaccaatggtttcacaggtagatcaacaactagaattatgtgaaaccaaaccaaattcaatcgatttgaaactattttacataggtcaatttatgtcgttcataaaatttaatcaaaaagaaaactagggttaagaaacttacatgtttataaaattgaatccacaggtactactaccatttgcatgttatatgaatgagtaaactatatgaaactggtttcatcttgagtattttgacgaaaatacaattatatatcagtctataactagatgaaaccagtttcatcctagtataacatggatgaaaataatttcaggtcaatccaaaacaggattatattggtttcatcctagtataacatggataataacaatttcaggtcaatccagaactacaactagatgaaattggtttcatcttgagtattttcacgaaataaagttataccaatgagtgatctatatgaaacggatttcatcttgagtattttgacgaaaacgcaattatatcacagactataactagatgaaaccggtttcaccctagtataacatggatgaaaataatttcaggtcaatccaaaacaggatgatactggtttcatcctagtataacatggatgaaaataatttcaggtcaatccaaaacaggatgatattggtttcatcctagtataacatggataaaagcaatttcaggtcaatccagattttacacaagcttaacccagatgaaactaattacatacaaacaaaattcaatgacttttaaaatggattttacaaaagttaaaccaataggatcaacaaacttaccagtgaaattgatggaagaaattttttaatgctcagcaccaccattgcattcaatcggaagcagcttcaaacccccgtttcctttgttgagtcaaaccctgaatttcaagttcataacctcactgcaagccatcacatatccaacctcaaaaccattacaatttcgtttcagattcaacagcagcatctgctgctcctccttctatcccatctgcttctcaatcttccactgccgtaactaagttcagtcccatatcaatttatgcaacttcatcttcttgaactcaatcggccattaaatccatcaactacacagtctcgaatcaatttaattgtggaagctctcagatcacagattcacatatcgaacccgtcttaatttcatcctctctatcttcagaaacccttatcaattcacaatttcttcatctgatttacccgaagaagcaaaccctaactccattcattcactgcaactctcaatttcataatccaaattcgagtcaacccattactgattctcgatcttagccatcatacccatcacgtcgatcaccatcttctctgcccatcaaatctctcaattctcgatctcacggaagtaacagcagccatgactgaaacagtggtggtggagaaacagaagatcaagagcagaagaagaaagaatggaaatggtggagatctggagaggggtaattgggtcagtttcaattaaaaagatttctctgtccatttgacccagactgaatcctaactgtccatttagcccagaaaacacacaattttggctatatagcccattttctgttatttttgctcgcttgacaaagcacacattcaaacgaagcaaaccacgcaacataattataaaagcatgctaatcactgcaatgctccacgttcctcaagtgatgcttttttccaagagcttgcaattgccttgctgatactagtattcattaagttacgtaagtttcagttgatggtccatttgtcataaccaacgatattcttgtttccttgttgttcactacggctcgatgaagcacggctttatacttcccgtttctcagtatctacaaaccaaaaacacaaaagaaaataaatcagaaaagcctgtgcccattagtcagttgtaaatgtgcaatcagggcaatctataatttactcaaatgagacttcggactcataacagagaactagtttagacgcacggacctccatatgatcaccaatgttaaccatgatagagttcggaattgcattcaccgcaacccattttcccttgttcttaatatgcaatccaccaacgtcattctgtatgagtagggttaagagaccgcgatcagcatgtgggggcaaacctattgctagttcaggccgtgggcaaggagggtagagatttgcagaaaacttttgaacaccagaatttagttcaagggactcttcgatgttttcttcctctaattcaagtccctccattattgctctaataagttctttcattatttctcttgatcttttactgtactcccttaaaccctcactgcacgagtagacaaatttagttttggtcgggtgcatttaacaactcggacaaatttataattgagtataaagatttaagcaaattagagatttacctcaaagcctcgggtttaacaggggaattaaacactggatgcactaaaactctaagataatccctccaaaaggagacactcctagaggcagggttaaaattggttccgcaaataattgggtccaaaatgcaagggtctgacgcattctctccctcgtaaaccgacttttcttccagacttaagtcgaagaaattcatgaaggagtttgttatggtaccaacacctattcctggtagaatccttaattagtttctctttatttggtatagttcagtttccttgttaagttagaactactttgcttgtttcgcacttattattggccatatatatatttggctctcgagttctgtaagggttaacaagttttaaagaaacctaactcttattcaacttcttttcttatcttccttatcaccctgttctcatcttctcaacttgttctaactcaattctcatgttttaaccctcaccaaaagggtatatcaagttactcagttgtctgtccattgtatttaggactagaaccctaatatctggtacaaagcgaggttgcgtttttaccaaaaaattttttttttacaatgggaggtcatgactatacggataatctgaagggcgttcatgacagcgttacaagtatgtctgctaaaattgattccctccttcagaaaattattgacgatctcgcagcaaaagaaacagctagagaggagaagaaacttgctcgtcaggaagaggccgatgctttaacaaagagtttgacagagggtctagctaagacttttgaatcagctctcacaaattcaatacgctctgtccttgaagagtttatacctaaaaagaacactgaaggtgaaggttctggtgttccacccaaaacacctcttgttcgtactggtatacttgacacccctcgtcctccaccagtgcagttgaagtttcctgtgtttgatggtgacgacccagatggttggattttccaggctgatcaatattttctttggcattctatggctaataatttgaaagtaaatttagttgctgctcatctcaaaggtgaggttaatgcttggttcaggtggaaacgaactcaacagcagattctcacattggttacgttttgtactcttcttcgtgagagatttcagaaaacgtttgtggatccgaaaatcgcaatttgtacaatcaaacaaaagggttcagttcaagattttcttcctgaatttgaatatcttctcaactttgtggattttgaggaaagtcacttaattaaactttttattcttgctctaaaaccagaggttggaaatgtggttaagttttgttgtctaccagacattcatggcggtcaagacagcatactgtttctactcctcctcaatttcgaaaaccttctccacctatgggtaagaaactgcttacagtggaagaacaaatggaacgtcaagccaaaggcttatgtttcaactgtgatgaacagtatacgcgagggcatgtctgtgttcagccacgattattggttttagagtggatccatccggagttgatgacaaggaggtcttctcaaatgaagatagcactgaggaagattttacaactgcagacacttctcaggatcaggttcaacctaccatctctttacattctttgcttggttcttcgtttcctaagaaaatgcggttggacggctacaccaaatctcaacctcttcgtgtcctaatcgactctggatctacgcataattttttgcttccaagatgggctaagcattgtggctattccatccattcagatgttacagctttgcaggtcacagttggtaatggtactcaaataccaactaaaggatgttgtctgaatgtaccaattacacttcaaaatcactttttcaccacatattttcatcttttagagattgggggttatgatgccgtgttaggagttcagtggctacgaacattggtcccaatcatgtgggatttctccaacctcacaatgcagttcacagtaaaggatacagccgtctatttacaagggagtaatttttcatcattcatgttgatggattttgtgcccatgcaacaattactctgtcgtgaaagttatgccgttctgttccaactgaccacagtaaatgcttcaattaatgattcgggttcagctactagtaccaattcaccagctttacaagaacttctttctcaatatgctgatatttttgctacaccgactacattacctcctgaaagactacaggatcatcgcattcctttggtgtcaggtgctactccagtcaacataagaccgtaccgttatccatatttccaaaaggctgaaatagagaaaatagtttctgaactacaagactctggctttatccgacacagaaacagtccctactcttctcctatattaatggtacgcaagaaagataattcatggcgcatgtgtgtcgattatcgggcatcgaataaactcactgtgaaggaccgttttccgattccgatggttgatgagttattagacgaattgcatggtgctggggtatttacaaagatcgatttgcgatcagggtactaccagattcgagttcacccagatgacatttctaagacagccttccgcactcatgatggccattacgagttcctcgttatgccgtttggtctgtctaatgcaccaacaacctttcaagggctcatgaattttatcttcagagcttatttacgaaggttcgtgttggtcttctttgacgatattttgatctacagtacgaatttctctgatcatctacttcatttacaattagtatttgatcttcttcgtacccataaactctttgtgaaggagtctaagtgcacatttgcacaacctacggtaggttacttggggcatgtaatttcggataatggggtataagtcgagcaagagatgatcgaatgtattgtttcgtggcctattcctacaacagtcaagaaactacgcgggtttttgggattatccggctagtatcgtaaatttgttaaggattttggcaagattagtgctccacttactcaactattgaagaaggatgctttcgtatggtctgacgaatctactactgcctttcatactcttcaacaggctttatcctccactccagtgttgatactgccggatttctccaaagaattcgctctagaatgtgatgcttcaggagaggggataggtgcagtaccactccaatctggtacgcctattgcctttcatagtaagtcattagctcctaagaatcttaatttatcggtttatgataaggaaatgttagcaattgtgtcagctgtgcacaagtggagggcatatttattgggtagacacttcaaaatttttactgatcatagaagtctcaaatactttctagatcaaaagttgtcttctatggaacaacagaaatgtgtttctaaacttttgggttatgattacgaaatcatttttcgtccaggcaaagacaatgccgctgcagatgcattgtctagaagaatcagcacacacttcagtttgtctaccccaatattttcagggatcggtgatatagttcagaagtgccatactgacatggaattgggtggtttaattcaacagttgattacatcccctgattctaagcctaattttgcttatatcaatggcattttacgctacaaaaatcgaattgttgtggttcctacgtctgcgtggtgcctcaaacttttaaaagaatttcataccaatccaattggtggccattctcgggtatttacgcacttacaagagggtacaacaaaatatctattgaagaggactcaaaaagtcagtcaagaactttatttcacactgcgatatctgccaaagaaacaagtcagaatctgtagcaccaccaggtctgttgaatcctttaccaatccccgctgatgtgtggcttgacatatcgatggattttattgatggttttccttcttcgaaccggaaaaattcaattttggttgtgattgatcgattgtctaaatacgctcattttatagcactaagacatccatactcagctagctcgattgcagaaatatttgtgaaagaaatagttcgtctccatggcatgccaagaagcattgtcagtgaccatgatccaattttcttaagcaaattttgggaggcttacttttctcttcagaagacacaattgtgtcgtagctcggcttatcatccacaatctgatggacaaactgaagtcacaaaccgtacattggagtgttatttacggtgttttgctgggatgaagccaactgattggacgaaatggcttccatgggctgaatggtggtataataccagttttcattccgctattcagatgacaccctatcaggctttatacagtcgtcctccgcccactatttcctcttatttgccagtctcttcttctgttcatgatgtggacttaactctaagggctcgtgattatacacttacactcctgaaatccaacttgcttgcttcccaaactcgtatgaagaactatgctgataaccatagaaccgaacgacaattttctattggtgattgggtttatcttcgcctgcagccttatcgacagacgacagtagctcaccaatccttctctaaactatctcctaagttttatggtccttatagagttattgaaaagattggttctgtcgcttataagttggaattaccagccaccagtcatatccatccggtgtttcatgtttcgcaacttaaacttaagcttcgtagccatacttccgtgcagcaatccttacctgctatagttgattatgagaaatgggaaccagattcgatacttgagcgtcgaatttatcagaaaggtgatagtgcagggacaagatggttaattaagtggaagaatcaaccccatgaagacgcaacctgggaggatgcagatgatttcttggttcgttttccagagtttgaggcttgaggacaagcctcatttcaaggggggtaggatgttatggtaccaacacctattcctggtagaatccttaattagtttctctttatttggtatagttcagtttccttgttaagttagaactactttgcttgtttcgcacttattattggccatatatatatttggctctcgagttctgtaagggttaacaagttttaaagaaacctaactcttattcaacttcttttcttatcttccttatcaccctgttctcatcttctcaacttgttctaactcaattctcgtgtgtttaaccctcaccaaaagggtatatcaagttactcagttgtctgtccattgtatttgggactagaaccctaatagagttgatcaattcctctttcaaactctgtggaactccatgattaaccacctatagttgtcacacgagcaaactcttggtaaacaaatcacttcaatatatgtaactgatgcaaacatcattagtaatgcaaatattattcatatataagctattaccatcaagaatccccaatgcagacatgcatatcgaagctcttcgactatcttagaccgctggtctggggaacccgaagtgaggagtgagaaatcaattacgggtagagcaacttgctccacagattcttcagctaacatagtgagatcctcgacttttgcagggagtgcatgtttggaatttgaaacagaaatgagatcagttgattcaatcaagtctttgatcataatacccattttcagatcaatgttgtttagctcaagatatcactatatgttctttagctcaggatgaagaaatgttgtggttggagaaagtttctgataggggtatatataggggagttagagaggatgtcccttgttgattgagtgatatctaataaccaaaccatcccaataatgcaatcttctgtttaccctcaactgtcagtactgttattcacaaggaaaacaactatgaacacacaaattaatcacgatgtaaatgttttagtctgataagaaaacatcccaccaacccggccatactcgtcctcaagagccaccaggtacggttacgactgtactataaaataaaataatggacacacgaatcaccttgcaaaagaaatgcaggacatgggtgtgtaacgtgtgtttgtgactaggagtggtggctaataccttctggaaggacatgggtgggccaaagtcggcaataatttcagtaaattatatactaaagatagtaaaaaacacaaaaatagggcaatgaagatccacctacgtctgcaagccttaatacgattcaaggaaacccaattattagattttaatgaacataatattcacccaccagagatctggatatgatattgtgggcttcaagatagtccatttgcagtctctagagatctcattgtggcatgtttaacaaaaaagaaaaaaaacttgtaagactttcaaataatttatatacgcacataagtgagaagatgtttgtgcttcatcaggattccactaatttcttagtgggtcataaactgggctagtcaaaactgtctatttctgtccaattgtataaaatgtcagttgtgtgttttgtgaagatttgttgataagatatgatcagttgattgattaacaaacaagcgttgaacttattgatcaagttgatcttttaagtgacacagcgcaatccacgtacacctatattccttttcgatacaaatatctgttgcatgggctagtgtctggcatttattcagtgagttaaaagaaaaatacacaaaaacagcagggcagtgaagatcataccacgaacagaaagaatcaacgtctatgccttaaaggattacaagcagagaaaccgattatcagattgtagaggatatcatattttatttagagttttggatatggttttagatttacataatttaggcacgcagctttttgctggccctcgagatggaccattggcagttactagagtctggagatacccttgctgccttaggcttcagtaaagcttgatgtaatatgctctatttccaattgttcaatatctaaatatcatgaagacacttttagttagaggaaatgcaatgttttgacaattttagttagagaaaatgcaatgttttaacaaagtatctaaacaaaatcctaaaggtacctagaaaagtaagaagatgtgtgttccaccatctgatcaccaatgttaaccataaaagagttccccaggaatccatttctctttcaaatccagcaatttcgttataattaggtacgtaggaattttattagatcttgaaccattttcttagtgagctcgaaactgggcttgttttggtacgagttagtggaatgaaaaacaacaaacatgctttgtacttacctcatcaatggaatataaatgaaaacttttctcgagacttttttctgcttctgcttctccaaaagcagaagtccaattccagaaacaaaaagcaaagacaatttgtttcccaaacatagataattaactttgataggaaattaaaatttacagtatgctaggaagttgttaacatttgaacatagtttctacattggagttttaatcttttaacaatgaagaaagtgttgcaagatctatccgttgatagctaccaaagttaagtgctagccaagatttcagagatggggtgcaaaaatttgttttgggttgcaaataaaattttagcggtgcaaataagcaaaattggactgtatataataaaaaaaatttatgttggacttaaattaggctttggagccagctaggcaggggtgcaaatgcacaccttgcaatgggccggctctccccttgctagcccgaagatgtccatgaactatccgttaaaaacatttatcggcctagaggtgtaaaagttgtcggcccaagacttcctagcccacgaaatcacgtgcttcgccaactatgtgtcgtgttgtgctgtgccggagattatggtgtgccgtgctagaaggcttgttgtgctggcatgtaccaaaaaaataaacgtgatgtgtcatgttgtgctgtgccgggcacatctatttcatattttgcaatataaatattttccaaatatttaggtataatatatgttattatgaaaataaatcaacataacgataataaaatgtcaataattgtctagaataaaggttcttttgtgaaatatacacaaaatgtgatgtattatgccatgttgtgtagtattttatacatattatctgcctttgtaacgtgctgtgttgtgccatgccgcatgctgtgatgggttactgtgccgattggtcaaacccaatccatcccatgaaattaacatgatgtgccgtgctgggctaaatcaagtgcttggcaggattgtgctcaaatttagcgtgatgtggccacagccaaattacacctctatatcggcccttaaaaagccactactagatgatacctcaaatttggattttaccttgaaatggaaaatactttacttaattacgtaccaatgtattcgaattttcaatcatccaataccacctactgaactcacatagtaatccaacaccaatgaacctaaggaatcttaagtgtgtctatattaacagacaccatgagctgatgaatttattgattcactgacagatattacaaacatactattcatatcactcatgaaatcacacataacaatgcataataaaatcacactaagcaaaccacacacataattatacatatgccaggctagtcatagttgacttcataaaccacacagataactccaattccaccatccacaactgacgttctgccaagaggtgggtaattgcattgttgatagtatttcttaagatactgaagttctcgttggtggtccattggtcataaccaaggatatccttgtctccttattgtttaccacagctcgatgaagcacgctcttatacttcccattgctcaaatcctacaaaaccagaaaaacagaagagaaaagaatatgaagaaggtagtagtactgtaccaagtgcgtgcatggagtaagaaaagtttcataggctacatacctccatatgatcaccggtgttaaccatgatagagttgggaatagcattcacagcaacccatttccccttgttcttgatttctagtccaccaacatcattctgcatgactagggttagaagaccatgatctgcatgtgggggcaaaccaatagcaagttctggctgtgggcaaggagggtagagattggcagaaaacttttgaacaccagatttcagttccagtgacttttcagtatcgtcttcctctaattctagtccctccattatggctctaagtaattctttggttatatctcttgatcttctgctgtagtcacttaaaacctcactgcataagtacacaaattccgtgttatctatgtgcatttacagacccagacaacttaaagagttcagattttggatacaacatttgacagagttagagctttacctcaaaccgtctggtttaggaggggaatgaaacactggatgcactaaaattctaagataatccctccaaaaggagacactcttagaggcagggttaaaattggttccacatataattgggtccaaaatgcaagggtctaaagcgttttcaacttcataaaccgacttctcttcgggacttaagtcgaagaaattcatacaggaattgatcaattcctctttaagactctctggaactccatggttagtcacctatcattgttacacgaacaaactcattagataatcacttcaatacatcgaactcattcaaaaattagaagtcattagtagtgcaaacatattaattaattcataagtgaattcataccatgaagaatccccagtgcagacatgcatttcgaaggtcttcgatggtctgagaccgttgatcagcggaaccggaagtgaggagtgagaaatcaatgacgggcagagtaacttgctctactttttcagctaacatagcgagatcctcggcttttgctgggagtgcatgtttggattgaggaacagaaatgagatcatttgattcaatcaagtctttgatcataatacccatttttcagatctagattttttagctcaagatataagtatatatagtctttagctcaagatgaaggaaggaaggttgtggttggagaaagttagaaatagagctatatataggggaagtgcaagaggatgtcccttgttggatgggtggaatataatgacaaacccagcttaataattcaagattttgttggccctcaagattcagtaatatacactacatgcaaattacgctgtgaatgttcttgtcagatgtgagacatctcaccaacctggccatacccacatcttaatcaataggaatgggctttatcaaatttacttgcttagattatatatatatatatatatatcatcattttcgaatgataagatgtgagtagtaacccaaacaaaagtaatggaagacgatagaaacgtctccatgagtcatcatgtcagtttgaaacaagaataacgagggaggaagataaacttcatacgaaaaataatattggttatatttaataagtgtcaaataagagaaaatgattcatagtttcagagcatgcaagtactatgctgcacattagtttcttagccgaaaaccccatataaagctaagcgaaggggagcgaaaaattgaagtgatccttggctactggagacggaaacttagttttaatatcgcaaaggaaaccaaaactacgtgtacacacacctatttatattggatttacggaaactaatattttttacatccggcaaaaactcagttttcggaaaccaagacatggcccaccggtgctgcacatctctatctaccgccattggtcttgactttacttactaatagatatggataaaattctctaccataatagttgttttggctagattgtaaagattaagccaaaaaaattatcaccacatgagccgttcctatggaatgaccaaactttcaagtttgttcattttgtttccactatcgactcaacaaacatgaaaaatggatgttcaaaccaataaatttgttggtttgttcattgagttgaaggatgtaacgagcgtttgatgataggacgcgagttggaaagagaagcgccggagttggaaagagaaacgcagggcgttggatgtttgagcgccctttgattttctctctccaacaacgcagttatgattatttttattatttttattatttgttttattagttaaataataagtgggaccaaatccttattactttatattaataaaatttctagtggaacccaacttttattagtttatattaataaaatcaattgtgggacctaaattatcagatttgttcattcctcgtagtgcaaaaaacgtgtttgttcatccacatggcttcaacaaaaaaaaaattgttgattgccataggaaatgccctatgagcatctccaacagaaggtgcaaaaaatcctatgtagccttttaatttagtccttatatttatagggtctacacatagagtaaaatatatgacctcatatctaagaaaccatctccagcggtagtgaacttttaaagaaaaatagtcaaaaatatgacttggaggtggagccggagatgtagataacactttctagaacaccttcatatttagtaacaaaaagtctttacagaccgagaggaaaaactacactgaaaaaccaccatttataaatcaccccttgcacgtcttccgagggactaggcccacattaaaaatatgtgagagaggttttttacctggttttatttctcgatctgtagaggagcactgatttagtaattggtccctcctaattagtaggaccctactattggagatatatgtgtcactaggaaaaaaaaaatgatttagccgctgttggagatgctctaatacttgttgtttttttctttttactcagctccataatacttgctcttagtaggcacccatcctggccagatcctctgttccttgagaagcgaagaaaaaacctcaccaaactgttcccaaatgcaaatgatgaattaatgatgttggggagttcatggaaagtacgtggtgtttcctacgttaattcattgaaaaagatgaaaccttttgggtatcccactttcccaagcgggtcctaaatatctagtaaataatttattaaagaaaattagtgctaatatatcaacgaaatttaaacaaccaacgtaattagtgctaaattaaaaaatagtgctagaagatttgattaatgatggtcctactaccaatataagcagtcgcctacctaagaattattgagaagatgaccatttatctggattagataaaaaaaaggacgtcggattctacgtctagtaacaaattgcactaataaaaaacattaactataagaaaaatccaatttatcgctcatcgtttctaaagcacaccagctcttacaatccatcaagagccgatactgatatccggagctgattcttgtagtcatctttaatgtgcactactgaaattatattcgaaatgtattcagtaaaatattgtttcggatgggggtacactagaagggtacttcattatcatagatggaagccaagtagatcgcaagaacaacacattgtaaaattctaatgttcacaatgaatagttcatgatattggccattatggaagttcaatcaaatcatttgaagatacgattaaaaccagagctaaaagattaatgtaagcctagatatataatcaacttattaaaaaaacttattaaaaaagaaactctctttctagaatattggatggtcctaactcatacgtacgtccaattacctaccgagcaattatcaattatcgagaagatgtcttattcacctggttataataaaaaggagaacattagattctatgtctaatgtctatcattatagctcatggaaaacctataactacacccttataattttatataaaggaaccaacacaaaacagatgaagctcaaactttattacgaagaagacgatattacaatggaggcaatatttaaatcatagttttagaattcacaattgtctctccaaggcaatacttagactctcaaataccttaacccttttataatttttttttggccgactttatgacagctaatattacatagtggatgacaactaataaaatccttcctttcacatgttatcttggaaatctccatgcgatatcatcgcactgatgagagaaagtgaaccttttcttcgtagaaggcgtcacactcaacacgtgaaccttatcttcgcacaactacattacgacgtcattgcttacctcaatagtgacttattagggttgtaccattacgctttgatgcgaacctctctttcgtgtttgtttggtcttcttggttcgcctaattatggtcatgcgatatttatgtatccacattttgcctcttcttcgcactgttcttgcgaaggaagaatggtgtgagaatatttaactattttccaattgatcccttttttagtattctctgcaatcaccgacatgatttcgtgctttacacgtaaccgtttacacgtgttggtaatttctctggatgattgacccgtctttatttctttccctttttaaccggtaactgctcctgggaccctgctgattcgccgtccctaataaatgtgaataaaggatattactacttctttcttcttcaatcacttcaaatttattttcccaaacttcttctgcaactttttttttctctctccaaactcgatgaaaattttgttttgatttgatcttcatattttatcaacaagaaacccctatcgttgaatctctggtcatcgaatcttcatcaaggttagttaatcttcttttacttcttatgcttgagtcaattttctcatggtgctttgattttgtgtatttcgtcgaatattattattgtttctgttcttgggattttgggagtatcttttcttctgctgcttttctgatctgatgatattcccatattatgtctttttagacgatgccaccgaaaccagtcaagaaaactctaccagacttcgaagagtaactaagattgaaaagaattaagcttgaggttccgcaaggatattcatcatccacccttatggattatgactggtgtatcaaggaagaatggtatgcgaataaggttattgtttcgctaggacaacttcaagcgggccttcctatcccactttatgatcctgaggttcccttattttacgagattctctcagagatgaaaactcaacgtgttattttgcaaatgggggggggggggtgatggtatttgcattatacgcgaattctctctttgtgcgactggtgtaggtcgctccacccgtcctgatttagatgatgattataatcctaaagattataatgtcgcatacttcttcaatcattacatagctcaatggttacgcgcaaaggtttttgctggggaatttgcttcatgagatctaaaaatatcaagaaggaggataaaatcatgaatgatgttgattaatacaataacacgaaccaagaaggtaagaaatactaactcgcgttactatttttaacaatattgttgtctctgtttcttatattttttggtttacgaaggatgagttgggtaggagtgaatctgaagatgatgaatccgcaagaggtgaaccaagtgaggaaattcttcccaagtacaaaaaagctcgtggaaataccatcaattactcccactttggggttcattagtcataggaaagaacctgtaggactaaatgttcactttaagtgcagaggtcttcaatctgtctgatgcgattgatattgatgcactttgtctaaagtatgcagattttaagcttgaatgtaggaaactactttatattaatgagaatcttgggaatatgcttcatactcagaaggatgtagttaaaaacttgaaggtcgaaaaagaggttttcagagtggagaattgtaaggtcattgataagaaagataaaactcttgaggaagctcaagatgaggttcgtcgtcgtgttaatattaagaaaatgtttgtggaggatcataacaaggctctggttccgcgagagaataaaatccatgctcggttatttgcagaagatgaggattttgatagggttttacttgaaattgaaaatgctagggttgaaactgctaaggttaacagtctgaaagaggaacgtgcagaaaaccttaaagttattctctccgagaaggaaggttgttttgatggatttcttaagtttttcgcctgattctttatcttattttgtgatagatttcatctttgcatgatgttttaaccctttatatttttcgcagcggccgaagaaacatatcagagggagtcgaaggaaatgaaagaaaattttgaggaatcccagaggaaattgagcgaaagggagtcttcttcgcatcaggtgaatgaactttctaactcactttctattctggaacttgatctatcttctcttgatactatgaattcaaatatgaaaagctcaagcgaagaaagaaggctttcctagctaatgctgaaaggaatgctcaacgacaacttaactttatatctcaagtagtctccgatatgatttgcgaagaatatggtcttggttatgcgaattccttactcatgcatggaatgcaattattatgcgagattatgtgaagtgaactttatgttatgcgaatgaatgttaaaatttcatgcgatcaagtcataagattgtgtttatatgcgaagggattactcaaaatgtagttgcaggaaatcccacaacacacccctaatatgatttcattgttgatcaactcatttttaggtttacactcttaattttattgattaattttttagtgttcttacaagaaagataaagaagtcaagaatgatctctgctctgaactttctctctcctatttacttgtttcttactcaaaaaagatctatctcccccattacaactcaaacgactatttataaaggaatacatagtggatgacagctaatctgtcctttattttcgggtatggtttgcatacattctcgcaaccttacaaatgttaatttcgcaaactatctaattttcgcagaactatcatatctttctcgtgatctttgctgacgtcatttattttatcattcttgaaattgttctgcgacgttgttgtgttgtgtcattgataatttcgctaaaacgttgtcgttgcgagattctgatcctacatcttgcctcttctcatatcttctctgcaaagtggagaatgatgtgggaaatgccgcaactacttatcttttcatattctgcatttatcacacgtattatttcttccatttatttctcgacacgtcttttgtaaccgttactttttaaacgcttatatctttccgtattaaccgtgtttattttctcgaggaaaaattccctctatatatattccttttcactctctttttctttccttttattctctctgcaacttcatcgttcttctgcaaattccattattgcaacttttcttctgtcttcttcaacctttttaagttcttcttcatcttcatactagatcttcatagttcgtaattttcttcgagacaatctccctgctattatttttcatggattcatcaaggttagtcttcttttttcttctttatgagttttgctgaaattgacatatttgaaattgatcttgtttattgccttattttatgttgtttatgttgtttatgtgactcccatactcttgttatttcagcaaaagcggctccaacactaaatttacagttcacaaccctaacattcccaaatcacagcataaggttgtcgcacataaaagaaagtctttgaatgagaaggtagtaagaaacattatctttttctaataacaatattgttgcctctatttcttatctggattgtaattcgcagggtgataaagatcttaataaacctctcaagaaatctcgccaccttaaaactgttccaacttctgttcccttccacctactcatttcttccaaatctcctgcgacatcttcgcaagataaacctttatctcaaattcgcgaaaatgttgcctctgatttcatttcttcagctgacctttctatgattgaaatcccccttgtggatctttctgcgaataaaacctcttctcttcccattgagagtgtttctcaaccttctatctctcccagttctctacccaagtctcttcctctttcgaaagaaaccgtgggagggatagatattgctttcaaagtttatctgaaattctggatgatggcaagaagtcttctactgatcccatcaagtataatgtttgcgaaattctgagcaagcatttgggttctgacatagttgcttcgcagacatctttagaaaaagaatgtaatgctctttttcttgaaaatcagaagcttcggaatgttttgctggatcgtgacaatcttcgcaagaagaatgatgaattgagaggtatgattttcttatctatgtctttcatttgcattttcgatgattttatccttcccatgtttaattatcctttaaatccctctttcgcatgttaagcattaaatcagaaacgaataatgaagagatatcaatttgaatctgttgttgaagaatcccgtgttgataaagaaatcttgatggatcaatataaccaattagataacctttattcatattttcttgatcagataaataatcttaccaatgaaaataccgaattagttcaaagacaagatctattaagtaatgaagtatctcctctttcttattctttaactaaagctaatttaagtatgaaaactttatcagatgagaataaaaccttatctcaagagaagcgaacttatttaaacaagatggcgatatcttcgcaacaacttagtattctccaaaaagtatgtgttgtccaagagcaatctcttcgctctttgagaaatgaacttaaagaagtaacagaatcatctatcgctgaaagggatacactcattcaaggtagaatagctttaagtgtaaaggcgaatcatcttaaagaacaatattccaaattagaagaatcttattcttctcttgtgaagaaaaatgccttatttatttctaaagagaaaaatcttcggtctcgacttaaaggtttagttggagataaatttgatgacgcaatggaccattgggagaatagttgtctatccttgattcaacaccttatttcgcaaaaggaaggtagtcattatagtttgactgccttaattatcttttctttgtcatatctctctgaattccttatcttaataaaattttgtattctatttttcgcagagtctgaaaagaatcttcattcttctatttctgttttggaggctaaatatgctaaaattcgcaaagaaaatgcattgctcgtctctacccttactggttctcgcgaccgagcagaaggaagacttgattatcttgcttattttacggatattcaagataggaatcatcaaagagcacttcttcgccaagttcatctctgggatgaagtccttgtaaatgacattttattgtccaactctcttcctcctacatcaattgatcctttagaagtagatgatgatgaagttcctcgtcttgctgatagtgattatgattacgaaagcggtgcataggataatttcttggaagatgaagaagagtttccttctaaagaagtatctgctggtgttaatcagaatgagaaagaaatttctcttgaagaagtaattgctggcgataatcaagatgctagtcatggcgaagatcaaaaccgaaatgaaggagaagcttgcgagaatattggcgaagaatttctgtcatctcctgctactgacattaatattgaagcttgagcttcttatctagctttgttttcttgaactgtcttatttttatcacttttgagagttacatttttcaaccaactttggagtcatcttttccttttaatattttgttgataataaagataattcttcttgtgtatcgattcccatactttcctctcattatctttcttgcaaaaaaaataatttgttacagatgcttataattaattttttttatcatatggtcttatttttccttcctaattaaaggtcttattatgccatctcttgtcattgcgacaaaatcgaggacgtccttgcactttcatacaaaaacccattgatcttgtcttaactttttattttgtattatgacctcttcaggaatgttgcgacaatatgacaggcctaaatattcttgcgaaaataaagccccatgacattgtcgtcttgcgacgaaatcgcaggacgtcttcgcactttcatgcgaaaacccattgatctcgtcttatccttttcttttgtattattgcctcttcaggattgttgcacaaatatgacaatccttaatatccttgcgaataaaaatcctgatgatatttgcgtcttaagacacttatcagctccctaatggagggtgccgcccttatctcccccctggttgccccttaaaggaggcgtacttctaccatacaaggttagctcctcccatatagtcttaacaacaaccagttgttttcgcatcctcttatcccttttacatatagagattatggttacgatactgcatcctaagtggggttttcttcaggccgagtgcagtataagccaagacttgtcaagaatgacaaggtacgcttcaaacgtccctggcactcttgactcaaccgtgtacctcggcgccttgatcagatcagaactccttgggagagtccttattatcttagtcgcccaacccaagtcatatgcttaggttgagaatccaaggtgcctctcctggatgggattcattgaccccaaatctccatgactcaggttccggtggcagtgtagcctttccctgagccatgcaacaggtaccccctaatatgacgtacttttggtcttacatttgcctcttgcgaaattgtattcgcgaactagggtgtacgccataaaggttcgcccttttcttttatgtcattgttctgtgattatctctgcgaaaatttcgcacatcatgatcttctttcgatatgagtaattctgcaattattcatttagaattcataacttctcaaatcttcttactgataatatattcttaaatacaacctgttccatggtctgtctaatctatgaccaacatctcttccttctggatccattaatctataagctcttgttccaactatctccttaatgatgtaaggttcatcccattttttcgctaattttccaccattttctcgctgatatattggtgtttctcgcaaaactaaatctcctggttgaaattcgcgtatttgacacgtttattatattctcgagctaatcttcgctgataattcttcatatgttgtaaatctttttatcttctttcttctatttcatcaagtttgtttaaaattaagcccgcactaagatttttctccaaagcttctctttttgttgtcggaataacaacttctgttggtaacaccgcttcaactccgtatgttaaaaaaacggtgacattcaagtagcttctcttctagtcgtattataatccatactgcattatgtacttgttagcaccatgctctatgatgtccttctaatttcgtctttaatacatatgcaattgtttaatttgttgcttctactttcccattagcttgtggatacaaaggagttgactttccacattttatcttgaatgcattaagtaacatttctatattctgcccctcaaactgtttcccattatcagatactagcggtgcaggaattccaaatctgcaaatgatatttttgaatgtaaagatacctttgtcgcgaatatgttgtactgccttcacttctgtccattttgtgaaataatctgttgcgactattaagtatcttctttgtccagttcctggtaaaagtggccccacaatgtctaagccccattttccaaagggccacacactggttgaagatgacaatggtgctcctggtgcatgtattttctttccatgccgctgacaatcttcgcaacgtcttgatatttgttttgcatcttcatgcatgtatggccagtaataaccttgccttttttctctatgtgccaaagatcttcctccactatgattgccagcatctccactatgtaacattttaagcaccttttctccttcctctcgtctcaaacatctgagtgatggtccactaaaggattttcggtatagcaacccatctcttaattcataattcgttgctcggatttttaacttgtgtgtttccaatctatttcttggtgtttctcctttcgccaaatatgcatgaagttccattctccagtctgcgacattgtttatttgtacttctttttcattatctattatcatcacatccacatcttcctcttctttattgattgatggtgacagaagtgtttgtatttttatgcatctcgcagttggatctgtcatcatgcttgagatgaaagaaaaagcgtctgcaagtctattatcctttcttgaactgtgcctccattatatttttgggattttcgctgacaattcttcaaccagcttcttgtatttcttcaaggatggttcatttgtattatactctccttttatttggcgaataactaactgcgaatcactagtgatcctggaattttctagtttcatttctattgcgaattttaaggcatgtatcacaacttcatattctgtttcattactagtggatgcaaatttcaatctgaatgaaaaagccatctttattccttctggcgaaattaaaacaattccaactccatttccttctccatttcatgatccatctaccaatatttcccatctatttggttctgttaataaatcttttggatctccatgctattcttccacatccataatttcttctacttcttcatcttcatctaaaggaaattctgccaagaaatccgcaacaacttgtgattttggtgaagacaaaatttcatatttaatatcaaaatggcctacttgtgcattccatctctccacccttcctgatcttttagaatttttcatcactgattcaattggtacttttgttaatacctttatcttgtgtgcttgaaagtatatgcgaagcttaaatgatgcataaactaatgctaagattaacttttcaatctttgagtaattcttctcagcggtattaaaagttttgctaatgtaataaatgggtttctccactcctgcgtctactcgcataacacaacacttaatgcatgcgacgttgtcgcaaggtaaattaataattcttctcctgattctgccttttgtaaaatagttgtatcataagatgttctttgattccttgaaaatccttttcacattcatcactccatttaaattttgcacccttcttgagtatatcgaaaaaatatttgcacttatctgatgatcgcgaaatgaatctctccggcgaagctagaagcccattcaacttctctacatcttttattgttgctggtgctggcatgtcacgaactgcttgcactttttctggatcaacctgtattccttcctttgatacgatgtagcctaaaacatttcccgaagcaactccaatagtacacttctcaggattcaatttaatgttatacttccgcatttgttcaaaaatctccctcaagtcttgtacatggtctttagcttctttactctttactaacatgcatccacgtatacttctaatgttttatgtatccatcttgcgaacaccttctctaccattctttgatatgacgctcccgcgtttcgcaaaccaaatggcattttcgtgtaacaacataaacctctaggggcaaagaaaacagtatgttcttgatcttcttcagcgagagggatttggttataccctttgtactcatctaaagatgataccctatcatttcccactgcgaattccaccatttgaggaatatctggtaatggaaaactatctttggggcaagctttgtttaagtcagtgaaatctatgcaaaatcctgattcttttgtttttctttgggacaatgaccatattctctattcattctgggtatttagcttctcttataattccttcctcaaacattttctgtaattcttcttctatttgggaatggtaagttgttgcaatttttcttattctctgtttaaatggtctcacatttttgttaatctccaatttgtggcatgcaattaatggatctattcctggtatctcatccatgtttcctgcgaaaatatctttatattctcgcaacaagttaacagttctttcttcttcttcttcttctatatccattttggtttcaattctcaatattagaggatcctatatagtcccaaggtttatttcttttgttggttctgcggcagtgtaactgggtttagattctcccattggtgttggttcttttattgcttttatgggtccttccccttcttccaaaatttcgctgggtattcctttgccttcttttgcccttatcatatatactctaaattcttcttccttctttgcttcctttgccaattttctgcgaaattgtttcctttttgcttgtccttcataatgttttacttcaatttgatgacataatttcgcattctcaacatctcctctgatttcacctattccatttggagtggggaatttaatacattgatgcaatgttgataccacaacttttatcgcatgtatccatgatcttcctaacaacatattatatggcgatttcatatccaccacgcacaatgttacatgtgtttcgatttctccaagtggaattcgtaccactatttctcctttaggttttgttgtggattttccaaagccgtgaacaaaatatgttgaattggacatttcttcgtctttgaatcccattacccggaatgcatgataaaatattatatcaactgaacttcctgtatcgattaaagttctgttcaacatccattctcctgtggattttattgttgtttccttctcttttcgtgtaataagcattgtgatgaccaacggagatgtatggttcaaattttcttttggtatttcttccgccatgaacgcaattttttgcttttcccaatctttcaagagtgatgttttttctaccgccataaccttttttccttcaaaatttcgtttatgtattcttcctttgatgttttcatggaattcattaatcaagctttttgttatcatattacactccaattttttgccattttcattaattctattcatctttcttctaactgattcactgatttatttaatcactttcttgatttgaatgttctcaatcaacaatcttcaactttcgatcttcaaattccctgtttctagcgccattatgtagttgcaggaaatcccacaacacacccctcatatgatttcattgttgatcaactcatttttaggtttacactcttaattttattgattaatttttgagtgttcttacaagaaatataaagaagtcaagaatgatctctgctctgaactttctctctcctatttacttgtttcttactcaaaaaagatctctctccccctttacaactcgaacgactatttataaaagaatacatagtggatgataactaacctgtcctttattttcgggtatggtttgcgacattctcgcaactttacaaatgttaatttcgcaaactctctaattttcgcagaactatcatatctttctcgtgatctttgctgacgtcatttattttatcattcctgaaattgttctgcgacgttgttgtgctgtgtcattgataatttcgctaaaacgttgtcgttgcgagattctgatcctacacaaaagaatatttaaatttaaaagtatatactttcctctgtttttttgagtaattcctgaggttgagtttggcatttgccttctcttgttcttgttgaggttttcctttatttttcattgagctttcttttcttgtcatatcatctgtggtcattgcttcaattattatcgcattatcatattctttccagtgcgtaattttcgcattgacatgacaaccatatattcgtataattattattagctagttttggtctttttgggtttattctgagtttttattgcgccttctatgtaaggtattatgttgtctcccactgactttaggtcttctgtttgccgcaggggtttcatttttctcgggcgacgaaatcacaggtgcctagtacttatgcaagtaaaattccatagatctctccttatcatatttttcgtattgttacctcttcatgatgtcattccgcgacaatgcgacaagcctaaataatccggtgagtaatagcctcctgacattgtcgtcttttgtggtcactcagctccctaatgaatggatccgtccctttatattctccttgactgtcccttcaaggaggcatacccctaactgatacagttgggctcctcccatccatattttccaacaatcaattttttttgttgttgcaatctcttatccctcctccgatatgtcttatggttacgagatcgaaccttagggggtttcttggggaccgagtgtacggtagccagaacttgccaaccggtaatggtcgaaaatgatccagacgtcccgggcacccgtagctcaattgtgtaccccgacgccttggactatttctacaccccttgccaaagaacttatttcgcttggttgttagcctagtttcctctagcgtatatgtcttatgttttcccctgattatgttaccaggttttccccaatgtgacgtgcctcttgcaaattatgcgaactagggtgcacgctatcattagatgcctatcctccctaaatagaggttttaaatattatgccgcctcctaatgaagtcttactagcctgttgaagaggtcttatttttcctattttcatataaggtcttatgtttgcctttttcttctactcgttaggtcttatcagcctgttgggtaggtcttagagttccctgttgctcgtttattcggagaagaaaattttcatttttcattaatatattcactcggtacattgttgaaatctttagttcctttcaaaacacgacaacttgcataactaaggataatattcttcaagataaactggattcatgtccacccttcgcctttgatcatcagcaatttcgcacgtcccattttctgcgatagttttgatcatgaaagttccttctcaaagtggttgtatattattgcatgatgtttcttgaggcgataacaccatgcgccatacccaatcgcctggtttaagatgtctcctttcgacgcgatcattgcttcctttgcctacctactttgtgaaatcatcgccggtcacaatctgacatttttgtgctcgcgtctttgattcaagtgggttgtcagtatcttcgctccattttgtaacatgttgggtgtttaccattgagctcccagttgttgtagttgtggttttaggatcatcgctcgggataccatctatatcctttgtcccaaccataaagaccattaattcctgatgtagtgcaagatatggcagaatcctacttggaaggaagggatcgacgaaagaatatccgttaaatattttcctatttgttatttttgttaggaaataagagatatcttgctagtattggcatgatattatatttagtaggatttcctctttattagcattaatcataaaagatattggcatatcccataaggcctatatatggccacgtttgtaaggaagatcggcagatttttgagaaaagaaaactcttcctttgagaagtttattcattgtgtgatttctagtactaacattctacaccatttggtattcagaaactgggtatcgatccttccaacatggttcgtggtagaggtcagggtggtcctcgcgaggctttagttgaggaggtaatggagagaacgagatacgatgaactatcacgcacggttgagcagctcgccggtcaggtagcaaccctgttacaacgacatgagcgccgtcatcctcctattgatgagtccaattcatctgatgccgatgacgataatgatactgataacccttttgctgggcgtgagcgtgaatctaggagttgggaatcatcattccgcatcgaaattcctgagtttcatggtagcgggttgacaccagaggattgtatcgactggttttctactgtggaggaagttctggaatttaagagggttcctgatgatcgagtggttccgcttgtggctacacgctttcggggtagggctgctgtttggtggcgtcaactgaaagcttcccggattcaaaaaggtaaaactcctatttcttcctgggcaaggcttgaaaagtgtatgcgttcagcctttttgccatttaactataccagagaactgtatattcgtttacaaaaccttcgtcagggttttcgttccattgatgaatatacaaaagagttctatgatttggtcactcggtcaggtattacagacaccgatgatcagcttgtctcccgctatataggtggtctacgtgagactttccaagacacactaaatatgtttgattatttttctgtgtctgaggttcaccaacgagctctgcgtttggaaaaacaattatcccgtaagtcaattagagcagctgttggccgtcctactattactccttcacagattgcttccgctcaacagaatgttagtacgtctcaaaggcctggtcctaaatgctaccgttgtggtgatcctggtcacttggcaaacgattgtcgtaaggctggtcgacccggcaaagctttacttgtagagccgactgctgctgatgatatatttgctgatgcggaggagacatcaactgagttcgatgaagtatttctgccgggagaccaaggtgactgcttgatgatttctcgaccatcgttcctgacgccgaaggttgacactgacgagtcatggctcagaaagaacatcttccagacaacgtgcaccatagaaggaaaagtctgtcgaatgatcattgactcaggcagctgtgagaacgtggtgtctgaagaggctgtgagaaaactcaagttatcgacagagaaacatcctagtccgtactctcttcactggctgagtaaaggttcggaggtaactatttccaaacgttgtcttgtgaagttttccattggttctgtatacgaggatgctttgtggtgtgatgtcgtggttatggatgcttgtcatctgctattgggacgaccttggcaatacgacagggaggtaattcacaatggtaaactaaacacatattcattcttgttcaaatcgactcgcgtcacgttagtacctgccaaggaaactgtgcacaaaccactctctaatctggcttccaattttctgtcttggcgtacgtttgagaccgagatgatggatgagggtattgtgttcatcctgtgtggcctttctcttgcatctgcgtcgactgtggcggttccgtcatgtatccagggagtattatcggactttgcagacatttttcccgttgaccttccggatgggttgcctccatctcgagctattcagcaccggatagacttagtaccaggatcggttctccctaatcgagctcattaccgtatgagcccaagagaacacgaggaactacaacgtcaggtaggggagttgttagccaagggtctcatcagggagagtcttagtccttgtgcagttccggcgttactcattcctaagaaggacggttcatggcgcatgtgtgtggacagtcgtgctattaataagattacggtgaagtatcgttttcccatccctcgtctggatgatatcctggaccagcttcatggtgctacgatttttagcaaattggatttgcgtagtggctaccatcagattcgtatacggcctggagatgagtggaagaccgcttttaaaactagggaaggactttatgaatggttggtgatgccgtttggtctctccaatgctccgagtacgtttatgcgtgtcatgaatgacgtattaaaaccattcttgggtaagtttgtggtcgtttatttcgatgacattttggtttatagtactaacttggatatgcacttgcgtcatcttcgtgaggtcttggtagtcttacgccagcaaaatttctttgccgctacaaagaagtgtgtcttcggtacagatcgcattttgtttcttggatacatcatatccaaggatggtatttccgtggatgaatcgaaggttgatgctgtgcgtacttggccttgtccgcaaacaatccatgaggccaggagttttcatgggttcgcatccttttatagaaggtttattccccactttagcactattgcagcagcaatcaccgattgcatgaagaatggcaagttttcttggacagatgcagctacagcaagcttcctcttactgaaggagaagctttgttctgcccctatactgtcgttaccaaatttttctttaccatttgaggttcatacagacgcctctaaggttggtataggtgcagtcctcagccaatccagcaaaccgatcgcattttttagtgagaaattaaatggcgctaagcgtaattacagcacgtatgaactagagttttatgccatcatccaaacccttaagcactggcgtcattatttgattcattctgaatttgtgttgtttactgaccatgatgctctcaagcacatcggcaatcaagacaagatgaatgcacgacaagttaaatgggctaattatctacaagatttcacatttgtcctcaaacacaaggctggaactcagaaccgtgtggctgatggtctcagtcgtcgacgaagtctgctaacgtcactacggacggaggtcttgggtttggaatcgtttgctgatttatacaagactgacccctattttggttcaattctggacgctgtgcatgctggcaacagtacccagttctcgctgttggatggttttctcttcaagggaactcgactttgcattcctgactgtagctggcgtttacgtatcattcaagaactgcataacgagggtcactttggtcgtgacaagaccttccagttggtttcaacatcatacttttggccgcgcttgtttaaagaggtacaacgtttcgtctctcgttgtcatatctgtcaggtatctaaaggttctacgacaaatgctggtctttatatgccattaccaattccgtctaagccttggactgatattagtatggactttgttgtgggtttgcctcgcactcaacatgggatggattctatttttgtcgtcgttgacagattttccaaaatggcgcactttatagcttgcaaaaaaactacggatgcagttcatgtggcatttttgttttttcaacacgtgtatcgtcttcatggtctcccagagtccattgtatcggaccgtgattctaaatttcttagtcatttctggaggtctctttggaaattattgcgtacggagttgaaattcagcagtgcttatcaccctcaaacggatgggcagacagaggttgttaaccgatctcttgggaacatacttcgcagcctggtgggttctcacactaaacaatgggacaagcatttgtttcaagcagaatttgccttcaacagagccattcataagagcaccgggtttagccctttccaagtggtctgtggatttaatccgcgttcaccccttgatcttgcgcctgtgccagatttgcaacgagtacatgccactgctgatgagttggtgcatcacttacagcagatacatgacgaagctgctcaaaacttggtggcgtcctctacgaagtacaaaacggctgccgataagcatcgtcgtcacgttgaatttgaggtaggtgatttcgtttgggctgtacttattaaggaacgtttctctacgggcacatacaacaaattgggtcctcgcaagattggtccgtttgaaattattgagaagatcaatcctaatgcttaccgtttgcgacttcccagtcatattcatactgctgatgtgttcaatgtccgtcatctcattccttaccacggcgacttgtctgatgatgatttttctaccctgcctaattcgggggcgaatttcctctttcccggggagaatgatgtagtgcaagatatggcagaatcctacttggaaggaagggatcgacgaaagaatatccgttaaatattttcctatttgttatttttgttaggaaataagagatatcttgctagtattggcatgatattatatttagtaggatttcctctttattagcattaatcataaaagatattggcatatcccataaggcctatatatggccacgtttgtaaggaagatcggcagatttttgagaaaagaaaactcttcctttgagaagtttattcattgtgtgatttctagtactaacattctacaccaattcctcacttcttttttcttgtcgtatcatccttttatggtttagtttcttttgatgtcgccatatttgctaacatccaactcatggaaagtctttgctttattcgtgtctcatttaacttctcctattccctttggcataaggaaacaaataccctggtggaatgtagaatccacgcctttaattccatctatccatggccttccaatcagggcattgtagggtgactctatattaactacacaaaaatttacttctgtttgtagtgatccaatcttgatagtcatagcaacctctccctttggcttagaggctacgccctgaaaaatgctcgatgctttttgacgagtgtgtgatagagttacaattcatgtatctcgcattcctttttacctcaatgataagtgttctagatggtcgatttccttgcggttgttgtgcttctcatttcataggaggtggtggtaatgttggaggtgtaactaggaagtgattcaactttccttgttccattagtctcattatgatcctttgaacgttcctgtagtcgttagttgtgtgcccgtggaatctgtgatacatgcagaactcgttactgcgccttcctggtaagggttctactctcaagtttggagggatcggaacttcttccatcaatattattgtttcccagattttttcaactgttatatttagccttggaagttttacctcctcaaacgctggtgcggtcgccctgcgctctgcaaacctctgatcattgtaccgtcccctcgcatcattaaaccttccacttgaatcattaaacctcctgtcttggtttcctcctccatattgtatgtttatatattctttgttcattattttttcatcgatgcttgacatagctacttgtttttgttgattattattcgatggctctccttgttcaaataggtagttcctgttaccatattgtttttgcgttgaagaattcacgttgttccctctttcgcgaaaggctgctgtgatatcatctctttctgtctttcttccaaatctatgtattcttcttggtactctccgagttctttcatcactatcttatccctctttctgaatattttagtatatagtaagtttttcacccacagtgcattgataatcgcgaggattaaatttttttcatcaattcgcccttcttgttcgctgcacattgttttccatcgcgttgtcaaacttggcaagccgtctccggtttttttcctcaagttaaaaattatttctctccctggtcttaatgaattgttactaatacaagtttcaaggattattctttgcagctggttaaatgatgatattgatccctcttttaatcctctgaaccatctgaaagctttcctcgttaagctagccgggaactattaacacaacactgcatcataactctctcattgaagaatcgtgagcatataagccttgatgtgctgaatggcactccctgttccgtcaaatatgttgttgaaagagggtagagtgcattttgaagggatctttgcatacaagatttgttctcatttcatatagttcctttaacatggtgcgatttaagtttgtttcgttgggtctcccactctatttttccttgaaggatttcttaagttcaactgatcgtgtaggcttagttcttttgcaatgcgaatatacagttcttcacttgtttctttgcgaagacatcgccttcgatgatcttcgcgttcattgttttctctaggacgaactcgcactcgacggtattcctcttcgatctcttctcttaggaagtttctccttcgatattcttcatcttcatttgcttctcgtggatgactttgccttagtagattttcgtcttcgttccttcctctgcgacgtgtatcgcggcgatgttcttctcttccttctatgtgatggttctcaatgcgattctcgtctctttcctctctgcgatgatgctcaaggtgattcttttctcttttctccatgtggatgctcaaggagattctcccctctctcttctctgcgatagggctctgggtaattctcttctttgcgatagggctctgggtgattctcttctctgcgatgagacccactccttctcgatgtgctcctaatggttcttgaagccgatgcggtgtatgatcttgcttcattaagtctgttgttatcctccattaccgttgcgttatgtcgcatgatactcacttgttcttctcctacttctccctctctttctcgatcttccagcaatctccttctcaactcttcaatggttatattgccttcatcgccttgaactcttctttcctcctgagttgtttgatcattttattcttcattgtttgtgtctgttgtgtagacaagtcctttttcataagtatcttgttagttttatcgtctagttgtacagtttgaacttcggatcccacatgttgagcttgggcacgcctttctcctgcagctgatgtttcactgatctcttctcttcgtatccttctgtttgtaaccgtcttcttcttcgtgtgtctattacgtgctccacccttgtcgttatccttaccattgcttcactatcaagttaatgataccggttttttacacaaaactcactgaattaacaaagcgaaatagatcttgcaaaaaatagatatcaccaagaatagagattcacgagttcttaaaactttaatgtcatctcaaataactgcaaaaacagtggatgtgaagatatttgtgccatcaaagcttgaaaacgcaagaaaactttgttaaaaacataatttgtgaaaacccaatagtaaggcccaaataatcatctactctaagtaaagcccaaatactagaatcttctaggccttctttacatcaagtattatctagagaattcttttctctagaattttcttataatatctaatttgaagaagagtctagatagaactatctagaaaagtaaggagttggtcatgaagcctataaataggcataggatggattcatttgggatcatccaacaacaatccacaactcaagtgagtgagtaagtagtaagagtgagagctagagtttagagtaagagccaaagtgcctctttgtaaacaactagtgtaagccaaagttgctacacaagcctcttgtaatattttcattttcatattaatataagcctcacctttcaattaaccaacctctcttcctaaattcatttccataaacccatcacatttccgcattgcgccaacaaatttggtatcagagcaaacctaacccagtaattctaaaactctactcatggcaattaatcaaaatattcaaggtttcaactatgcccaaagtctaattccaatttttgatggtgagagttacgattattggagtctacaaatgaagacactattcatttcacaagacctgtgggattttatagaagaaggttataaagtaccagagtcggcagaaactctgtcgtcatggacggacgcagagaaaaaggagtataaggaaaataagaagaaagatgctaaagcattactgtttctacaacagggcgtaaccaaagctatttttcctcgaatttcggtggcgaaaacttcacaggaggcctggaatattctcaaagtagcattccaaggatcagaaaaggtaatctccattaaactacaaaatttatggcgagattttgataatttacttatgaaagaaaatgaaactatccagaatttcttctcaagagttactggcatagtaaatcaaatcagtagttatggagataccattgaaaataaaagagtggtagaaaagatattaagaagcttaccattcaaatttgatcatatcgtcgctgccattgaagaatcaaaaaatttatcgactctctcggtacatgaattaatgggttcactcgaggcgcacgagaaaagaataaataggttcgcggagcaaccattggagcaggcatttcaatcaaaaataaatttcagtgagaagaaaaatacaaaagccaaaaaagaaagctccagagggggatcgtcatccaactcgcagtacgagaaagggtcgacgtcaactcaaggacccagaaatttctaccgcggacgtggaaaaggaaaaggaggttatagaaacaacaatcaaaggtacggaaaaaataactcctcaaatctccgatgcaatgtttgcaaaaagtttggacatgcaactgaaggttgcaagtataagtgcaccaagtgtgataaattaaatcacatggagaaagattgttggcttaatgaagcaaactattccgagaaaaaaaattctcaaaatcaagtattctattcctgcctcacctcgcaacaagaatcgcaaggtatatggtacgtcgacagcggatgcagcagccatatgacaggaaacaaagaatatttcataaaattggaggaacaagagattccgccagtcaaacttggagatggaaagttccagaatgttgaaggaagaggagtcatatccgtacgtacaaggtcaggtaaaactcgatacatatctgatgttctttatgttcctggcctagctcaaaatttattaagtgttggacaacttataagaaaagggtactcactacatttcgaagacggagaatgcacaatttacgataaaattaataatcaattggtggcaaaagtaaaaatgtcaggaaattttgtctttcccctatctatgccatcaattgaaaattgtgcaatgagtaccaaccatattgacgaaggaaagctatggcatttgagatacgggcatctcaactacagatccttaaaggttctaaaatcaaaaggcatggtaattggtcttcccaatatcgacggtggagataaagtatgtgaaggttgtattctagggaagtttcatagacttccatttacgaagacatcgtggagagcaagaaggcccctcgaattggtgcacgctgatatatgcggtccgacaagaacaacttcactcaacaacagaagatattttctcttattcgtggacgattataccaggatgatgtgggtgtacattcttgagcaaaagtccgaggcattcactaaattcctagaattcaaggcgctggcagagaagcaaagtggccatcaattgaaagttttccgtacagaccgtggtggagaatttacttcaaaagagtttatcaactactgcaaagaaaatggaattaaaaaggagctcaccgtccgatacactccacaacaaaacggcgtcgcggaaaggaaaaatcgtacgatcgtggaaatggctcgcagtatgctaaaagcaaggaagctacccaacacctactgggcggaagcagtcaacacagcagtgtacatccttaatcgctcgccaacaaaagcggttcacaataaaactccatacgagggatggcataagaaaaagcctgaggtaacttctttcagaatttttggttgtgtagcatactcacatattccatcccaacatagagaaaagttcgatgaaaaaggagaaaagcttatattcatcggatatagcgaggagtctaaagcctatagacttctaaatccagatacaaaggaactggtaatatcaagagatgttatctttgatgaattcaaagcttgggattggaatgatgaaccagataaccacgagtctccactactcatcgaagaagagccatatctgtcacaccaagaagaaaacactccaccagcaagcccgagatctcctagtccaacacaacaaagtccaagctcatctgactcaagtgccccacctagaaaggtgcgttccctaagagatatttataatgtatctaattgtgcttttatagcactagaacctcaaaaatatgaggaagcggcaaaacaagaaaaatggagaaacgccatggacgaagaaatgcgagtaattgagaaaaataagacatgggagctcgtcaatcagccagttgataaagaaataattggtctgaaatgggtctacaagacaaaatataatgaagatgggtcaattcaaaagcacaaagcaaggctagttgcaaaaggatattcccaacaaccaggaattgactacaacgagacattcgccccagtcgctcgcatggaaacaatccggatggtgttagctttggcagctcaactcaaaatgaaagtctaccaattggacgtaaagtcggcgttcctaaatggagaactcgaagaacaggtgtacgttgaacaacctcaaggatatatccgaaaaggaaaagaaaaaatggtatatcgtctccgcaaagcactatacggtcttaagcaagcaccgcgtacatggaacagcaaaatcgacaagtatttccgagataatggatttgagaaaagtccaagtgagccatcactttacatcagaaaacaaggtacggacttcctaattgtctgtctctatgttgatgatttaatttacgccagcacaaaacaagacatggcagaaaaatttaagaaggagatgatgaaagaatatgagatgacagacttaggacttatgcgatattttcttgggattcaagtaaaacagtctccggaagaaatattcatttcccaagaaaaatatgcggaagacttactgaaaaggttcaacatgatggattgcaaaccaattgcaactccaatgggtaccaatgagaaattggtaaaaaatgatggagcgacaaaagttgatccaaccttattcagaagtctagttggctcactgatctacttaacaaatacaaggccagacatagtcaatgcaaccagcattgtttctcggtatatgagcgagccaagcaaattacactatgccgctgcgaagagaattcttcgatatatcaagggaacaaagaattttggcatcaagtatacaagagaaaaagacaatgatttaattggcttcacagatagcgattgggcaggttctattgaagatcgaaagagcacatcaggctatgttttctgtatgggaacaaaagttatctcttggagttctaaaaagcaaagtacggtggcactatcatcagccgaagcagagtacatagcatcaacaagtgcagcatgtgaagcagtatggttgagaagaataatgaccgacctacaacaaaggcaaaagcagccgacgactatctactgtgacaatatgtctacaattgcaatgacaaaaaatccagtctttcacggacggacgaagcacatagagctacgacatcactttatcagagagctggtcgaaaacaaagaaattgagctccaattttgtccaacacaagagcaaaatgccgacatcttcacaaaagcagtcacagtggacaaattcaatcattttagagaaaaacttaacatcacaaattaagagggggtgttaaaaacataatttgtgaaaacccaatagtaaggcccaaataatcatctactctaagtaaagcccaaatactagaatcttctaggccttctttacatcaagtattatctagagaattcttttctctagaattttcttataatatctaatttgaagaagagtctagatagaactatctagaaaagtaaggagttggtcatgaagcctataaataggcataggatggattcatttgggatcatccaacaacaatccacaactcaagtgagtgagtaagtagtaagagtgagagctagagtttagagtaagagccaaagtgcctctttgtaaacaactagtgtaagccaaagttgctacacaagcctcttgtaatattttcattttcatattaatataagcctcacctttcaattaaccaacctctcttcctaaattcatttccataaacccatcacatttccgcattgcgccaacaaacttcacccaaaatccagatctaagacttaaagatgataaatatcttgaaacgggataaaactttgagaataaattgttattcaatattgatattgtgaaaatgagatgattagaggttttctaaagcacaaaaaagatgaaataatgaacttaaaccattttctcaaactactcactaggtgaggataaatcctcttactcctcaaagttgtttctagcaccaaaatgtaaccgtaggaaaacttataactacacccttatgatcttatgtaaaggaatcaacacaaaacagatgaagctcaaactttattacggggaaaaaagatattaaagtggaggcaatatgtgaaccctagttttaacaactcataactttctttccaaggaaatacttagactctcaaagatcttatcccttttacaatgctctcttggatcttatataggactttacatagtggatgacaactaataatacatagtggatgacaactaataaaccctaccttttacctattatctcagagatcttcatgcgataccatcgcgctgatgagagaaagttaaccttttctttgtacaaggcgtcacacttaacacgtaatccttatctttgcatagctacattatgacgtcattgcttacctaaatagtgattgattagggttataccatcgctctttgatgcgaacctcactttcacgtttgtttggtcttcttagttctcctaattatggtcatgcaatatttctgcatccacaatcaccatgcacatatgcattgtataataatattataaggaaaatttagtgtaattttgcgcattcatcactacttgaatgtaaaaatattaaaaataaggtccattcattcccgtgcaataatgcacgggctagttcctcgattgattagtgacgtgacctttttcattcgttcacttgaagttttcttgtcatgaatgtatatcatatatctctactgagcacaactgggtgaaaaatgtgaaggtaaagctattatttttgtatctctcaactcaataagattcaagattgaacactttaattgtcgataatatttgaacactttttccttcactgcgtgcaacatcttaataattttataaaacatgaaagtaacataatgctgtcatcaacgcattaaaaagatgtatggctggccattcatgcacatcagcatctgccccatttttgggcttacactaatttgatattctcttacctaaggttgtcttttgcaaaacctccaatttataatttaaaagatctttctctgtccgtggtatttgacatgtctgtttcaatacaagaattctattattggggctttaaaaaatgagggaaatctgggggcttatgggatcatgaaataacaatgcatagatccccttattctggaattttatgtaatacaaattgaaaaagcggggtctaacaatcacacccaataattcgtttggcaatctgagaggacttaatccaattcactttttagagaatcaactagacagtcagactcaatctagataaaagtatatcagagagtttaatatctctaactcttaattcaatccgcaatcagcaaataaaaattatgcgagcctgattgaatataagaggagttaacttgaacggtaccaaagaccaatgctcaagtgccaatcaatgtaaatcaaaaaccaaaggttggatattctaattgattgatcttaatgcacaacctgtgatatttcaattatataacaaaatataatgcggaaaaaaaataacacagacaccagaattttgttaacgaggaaaccgcaaatgcagaaaaaccccgggacctagtccagattgaacaccacactgtattaagccgctacagacactatcctactaccaatgaacttcggactggattgtagttgaaccctaatcaatctgacactgattcaaggtacagttgtgctccttacgtctttgatcccagcaggatactacgcacttgattcccttagttgatctcacccacaaccaatagctgctacgacccaaagtcgaagacttcataaacaaatctgtctcacacagaaaagtctataggattgaataaatttgtctcccacagaaatacccaagattttttgttccgtctttttataaatcaagttgaacaggagcaacttgataaaccggacttatattcccgaagaacatcctagtattatcaatcacctcacaataatctaaatcgtatggtggcgaaactagatattgtggaatcacaaacgatgagacgaaggtgtttgtgatcacgttttatcttgtctatcggagaaattaatctcgagcaaatcttagagaagacagtactcaaacaatagaatcgggcaagatcggaacactcaactacaagataaatagttgggtctggcttcacaataccgatgaagtctttcaagtcgttaacctacaaggtttaggaaaacctaaggttaaaggagaatcgactatagcttatgcaactaggaacacatagaagtgtggggattaggttccccagttgctagagttctcctttatatagttttcaaatcaggatttgaaatccaagttaccttgttaacaaagcattcaatattcaccgttagatgaaaaaccttattcaaccaagctaatatttttcaaccgttagattgaacttagcttgttatacacaaatgaaatgtaccctgatttaggtttatgaaccgtacccaaacgtgtgcacccatgtttgcttaacaatggtcaaccgaagttagccatatgataactctcatatcaactatattcatcttatccatagctagttcagttcaaatgactcaaatgaaactagttaaagagtcgttcaattgtgatattctcataaaagtatacaagaacacaaccgaaacaaaatcggtttgattcactcgactcaattcatgaacattataaccacggtttgcaaagattgcattccttattatataaatgtttaagttcatgtacacaaccgattttagaaagtaacccactcaagtacgcaaacagatacgcatacttgagtagccgaacatgagtttggttacgccagtacgtgtacgggtgcgcatacttcaacacattccaaattctagcaaattgtcacggacgtgaactttccgccagtatgcatacgggtacgcatactttccaagacatcagtaaccaccaggacgcgtacgggtacgcatacttcaggttcccggttttggacttgtacattaatgtgattaacacactatgcttatcttcaaatatggttagatgattctaaactctttatataaatctttgaaactttcttagaggacgttatatacttgttgttcaaaaactatttttcacaaattgattttcaagttattgaaattatcataatgaaacttttcaagacaataccaaatgattgtatcacacaaaccatataagatgtgactcgacaattttcatatgatcttattccgactttagtcacgaatgtaagatgaattcagccgaagcgaaagcttgccaacacatattccgagaaatatataagcgagataaactcaacttgaaatctcaaatgtgtaaaatagaaactatatcgtaacacgacatatgtctcaatatagcaggtagagtagaaatagacttttcaagtgatagataagtttcagtctccacataccttttgtcgatgaagttccacaagctgtccttagtattttttcgtcttcaagagatgaactccatgaattctaaagctcaactacacaatcaatgtcctagttacgagaaatataaataggctagaaatcaagactcatagttttgatcactaacattgataaacatgcttgagatagcaacgcatgcgagttcgaccgagcaatgctctaacacatattctacccataatatgattagtactaattatattgattaagataactaatcagtattagtgaatggattagactaatcaaatgattaatattttggaaatcaaaacttgacgttccttgattttccttgattttgattttgattttgaagaaggaagaatggtgatcttggtgaaatgtttttcaaaaaatttgaagaaaaatgatgaaacccttcgtcccaaaactcgggataaccatataatcaactcccaacatcaatttatcgattcaaatccgttaaaaatcagagcaatatctgaaaattttacttgttacggcggggaaattgtgtcgaaccagccgtaaaacggtacttacgattaggatatgaagaattcccttccgtgaacacaaaaaacggatgggaagtgaagaacttctggccgttattcttcccataatctcctgagtctgtattacggccgggataacatatttttcccgtccgtaaatgaatatgtaagttgacaaatttggattttcagcatgaattgttagagcattactcggtcgaactcgcatgcgttgctatctcaagcatgtttgtcaatgttagtgatcaaaactatatgtattgatttctagtatacttatgacgaagtctcggtctaggatagttaggaatagttgagctccagactccatggcgattatcttacgaagacgaaggactactcaaggaaccactggaacttcatccgaccaaaaggtatgtggagacttgaactcatctgtcactcaaaagtttatatagtccatctcctactcttgagacaaaactcgtataagtatgatagttttcatacacacacatttgctatttcgagccgagtttactcgcctaactttttatcgaaatatatgttggtaagcttttgttttaacgattttcatcttgatggtgtttcaatcttgaaaatagctttgatgacgatagtcgattctttatgtctgaagactattataacattatagaagaatgtttcgatgattgaaatgtagagttgatattacgtaaccaactacggatataatcatatatagtgtattcgcacattaatttataaatccatgtgccagaaaccaagtgcgtgcatatgtgtgcatgaggtattggtaaaggagactggttaggtacgcgtacccgtacgcgcactggcggaagttttcataccgaaaatttctgctatagtttgtaaagtttgcaaactgaaaaccagtcacctaggtatgcgtacccgtacgcgtacccacagaagttttcaaaccgaaaattaatttctgttgagtttttaaactcaagtctggttgttatggtacacgtacttgtacgcgtacctaagctggttatatttctcaaatcggtagtttcatgaacttaaaccataaatcaataaggaatgcaatctttgttaaccgtggctatattgttcatgaattgattcaaatgaatcaaaccgattttgttttaattgtgtctatgtataaagatctaagcaattgaacaactcttgaactagttcttatgagtcatttgaactagttatgagaaaaatgaatacggttaatatgaaagtgctcatatggctaaccattggttaactatttgtgaaccaactaagtgtacacgtttaggtactgttacttaaacctaaatgaatacatttcatgtgtgtatgacaagttaagttttgatctaacggttgaaagatattagcttggataaatcaggtttttcatctaacggtgaatattgaatgctttgttacaaaggtaacttggattgcaaaccctgatttgaaaactatataagggagacgtctagcaactggaaaaaataatccccacacctcctgtgtgatactagttgctggtttactagagacaattttcctttaaccgtaggtttcttctcgagaccctgtcggttaacgacttaaagacttcattgggattgtgaagcctaacgaaactacttctcttgtagttgagcgatctgatcttgccattttctatcgtacgagttcaattgtaagattgacttgagattatatctccgatagggcaagataaaaagaaatcacaaacatcttcgtctcatcgtttgtgattccgcaatatctagtttcgctaccatacgatttagattattgtgaggtgattgataattctaggccgttcttcgggaatataagtccgggttatcgattggttcctgttcaccttgattttataaaaaaacggaacaaaacttgtaggtttatctgtgggagacagatttatctattatcatagacttttctgtgcgatacagatttgttaattaaagtcttcgactttggttcgtagaactcttggttgtgggtgagatcaactaagggaatcaagtgtgtagtatcctgctgggatcagagacgtaaggagcgcaactgtaccttgaatcagtgtgatattgattaggtttcaactacagtccagaccgaagttaatttgtagtaggctagtgtctttatagcgaattaatacagtgtggtgttcaatctggactaggtcccgggatttttctgcatttgaggtttcctcgttaacaaaattttcggtgtctgtgttatttctattctgcattatattttgttatataattgaaatatcacaggttgtgcgttgtatcgatcaattgtgaaatccaacctttggttgttgattgaaaattgattgatccttggatattggtctttggtaccatccaagtttatatctctcttgtatttgataaatactcgcatatttatatttgcttgagtatagatcaaatcgagagataaagatattaactccttgatatactttttattaagattgagtcggactgtctagttgattctcttaaaagtatattatatttagtccatacagattgctaatataaatattgggtgtggttgttagacccccgctttttcaatttggtatcagagtagacaaacacgttaaagaccttataagtttgtgtttgtagcgatttgattatggaagagtctatctttaataacgtaccagtttagaaattaccagatgattctaaaagcttggattcacttgagagaactgtcacatctaagtcaatatctaaacattctcttgatgtaaaaactctcctagaagaacagttggattaactgtctgatgaaggtgattctatattgataaagatgttgatgaggaagtctcatagtatgttaagtttttggatttgtggaatatgaagaggattacaacttctcatgtatcacctcctctgactcctctctgtcgagaaaacaagaaattgagaagatgttatgcaagtgtttatttatcgaatcgttctaacgaatccatcctcaaggattttgaggaaaacctacatatgaagtcacttgaatgtgataatattgatcaaaagtactttttgttggaagggaaagtttccgaatctgaagcaaggtttaactctcaacaaattagttttgatgacagagaaagtgcttgtctcgctcgacaaaaacgccttgaagctgatttagatgttgctcttgataaaatcaagatgttggaagatgacttgaaaaatttcaatactagttcaagcaaattaacaactaatctaggataaagtaaaaaacatcgtgatacacaatgattaggctatacgggaatagatgctccaagtattagcaaagaggtaaaatttgttaaggctagtgattcttctcaacaaaaggtttccactgatggaaaaagtgaaataccttcaccggcatagtacacattccatgtatgaataacatcatttaaaataacaatacaggggtttaggtacgcatacccatttgcatacggctccaggatacgaaaattcgtttgcaaacccgtatgcatacttgacgtcgatacatagtaaaaaaattttggccgtaaactcttcgtccgaactcggaacaacctcattagttttgcattctgttcctccttgaattatcttcaaaatggtgatgagaaatcctaaatgtgaatgagttgatattggtctttgtcccgtatcttgtttttgagtgttttgctccgtttcgtcacacttgttctactggacttgggcacttggattcttggagtaattctcttctaagctcatttgtaatttttacaagaatgatgttggtgaatcacaaataaagaaattcaagaatgagaagtagtacgtattattatgggattcttgaatgttcacaatcatcttatgtgaactatgacgcatggtctttaatgactttgtatgttcttctttgttaagaaaatatttttatacgcttttggtaaccactcttggtgtaaatccgtgtgaaaaagattgattctaccttctaaggacaaagattgatttttgcagtattaatatttatggttttatatattgcaatatgttatgggatatgtatgtttgcgtccgtgaactattattgtcccataagatgtcaaaagttatctctttcatatgtcgatatgcatgtattgatacaagatcgatgaacttttgacaaacaaaaattaagcctattatgtcaattctttgatggaagataggttaaaatcttttgtttacaaatattatgtctattatatgtcgttatgcatagaataaatctttgtatatgccgcagtattgatctttccctgatccatatcttatgtgtatactgcaataccacatccctaatccatgactacgaaaaaaaaagaattataaatgatacattacccacaaaccaatatataaaagtaaaataaataaacatttgttatattaaaacaaaaaagatacctggataagagcaacatatcccgtaatttgcgtttcgttccacctagaagctttgcaaatacattccatcacactagcaaggaaggcggtgccccgcgagtacctaggtaccccatttgtttcctgatcgatactgagagtcttcaaccactacaaatagcacgcatttaccttatttcctgagaaatcggaaaaaagacggtctcaagtgcgtgcaacaagtaagctatagccgtatgtctagctctttatgcgttcatcaccacctctccactagtagtcttgcggttagaatccccaaacttgtccctcagacaaaccaaattaatcttcctttacatattaattgtttcactaagttcccccggttgactaaattcccttttagctctaagcgcggctccataccctatctcaaactcttcttccgcttcatctttggcccacccaagatagtctttcgccaagacacaaagatgatcaaaatgaatagatcgaaaccctcaaacacggcctttccttccaaagaaagaccggtgatttgttttgcatcattcggagtcatagtcatctcgccgaacggaagtacaaaagtcatggttttgggacgtaagctttctcttaaaccacaaactgtcacaacatcatatgtcttctgcaaagcctcgattccagatcataaccctgaagcttttatcaaagctaccacatctggatgctctccgtccaacgtccaaaactttctttgttggtgctttagtttggggaccgctttatcgggaaactacaaagaatataaagttgttacaataaaattgtagttgcaggaaatcctacactacactactcataagatttcattaacattcaactcattttagattaacaatcttaattttattgatcaatctttgaacaatcttacaagaaaagataaaggaatcaagaataatcactgctctagattttctctctcctatttacttgcttctcactcggaaaaagatctctccttttcctttacaattcagcgactatttatagggaattacatagtggatgacacctaatctgtcctttattttcagagatgtcttgtgacatcctcgcatccttacaaatgtttttctcgcaaaatctctaattttcgcaggaccatcacatttttctcatgatttcagctgacatcgtgtattatgtcatttctgaaattgttctgcgacgctgttgtgttgttgataaatttgctgagacattattgctgcgagattctgatcctacatcttgcctcttctcatatcttctctgcgaaatagagaacgatgtgagaaatgccgcaactgttcatctcttcatgttctgcatttatcacaagtatcctttcttccatctatttcttgacacgtcttctgtaaccgctgctttttaaccgctcacgtcttttcgtattaatattgtttatttcttcgagtataaaatcctctctatatattcttctttccattttctttttactttctcttctctttttattctctcatctctgcaactctattgttcttccgtaaattctaccattgcaacttttcttctttcttcttcttttattctttttattttcttcttcatctccatacttttccctctgaagatcttcattgttcgtaactttcttaatttttatgaattaatcctcctactggtgttttccatggattcgtcgaggttagttttcttttttctttcttatgggttttgctgaaattgatcttgcttactgctttatttgatgatgttgcttatgtgattcctgtactgttgttatatcagcaaaaacgcctctaacaccaaatttacggttcagaaccctaatattcccaaatcgcagcaaaagattgttgtaaacaaaagaaagtctgcgaatcagaaggtaataagaaacattattctttcttaataacaatattgttgcctctgtttcttatctggattgtaattcacagggtgataaggatgccaacaaacctctcaaaaaatctcgccaccttaaaaccgttgaaacctctgttccattccacttacttatctcttctaaatctccggcgacatcttcgcaagttaaaccattatctccaattcgcgaaaaacctgcctcagatttcatttcttcaactgacctttcaatgattgaaaacccccttattaatccttctgtgaatgaaacttcttatcctcctgttgataatgtttctcaaccttctatcattgccagttctctatctgagtctcttcccttttcgaaagaaactgtggaaggaatagatattgctttcaaagttttgtctgaggtcttggatgatggcaaaaagtctcccattgatcctgtcaagactgatatttgtgaaattctgagtaagtattttggctctgacagagctgcttcgcaaacaactttggaaaaagagtgtaatgctcttcgtctcgaaaatcaaaagcttcagaatgtttcactggatcgcgatcatcttcgcaagaagaatgatgaactgagaggtatgatttccttatctatgtattcaatttgcctttctaatgattttatcctttccatatttaattatccttgaaatccctctttcgcatgttaagccttaaaccagaaatgaataatggagagatatcaatttgaatctgctgttgaagaagcccgtgttgataaagagattttgatggatcaatataaccaattagataacctctattcatactctgttgatcatataaataatcttaccaatgaaaatacccaattagttcggaggcaagatttattaagtaatgaaatatctcgcctctcttattctttaactaaagctaatcttgggatgaaatctttatcagatgagaataaaactctatctcaagagaaacaaatttgtttaaataagatggcgatatcttcgcaacaacttagcatccttcagaaagtatgtgatgaccaagagcaatctcttcgctctttgagaaatgaacttaaagaagttacagagtcatctatcgctgaaagagatacactcattcaaggtagaataactttaagtgtaaaggcgaatcaacttaaagaacaatattccaaattagaagaatcttattcttctcttgcgaagaaaaatgcctttcttattctaaagagaaaaatctccagtctcgacttaaaggtttagttggagataaaatttgatgatgtgatggaccgtttggagaataattgtctgaccttgattcaacatcttatttcgcaaaagaaaggtagtcataatagtttgactgccttaactatcttttctttatcatatctttttgagttcttcatcttactgaaattttgtattctacttgtcgcagagtctgagaaaaatattcattcctccatttatgttttggaggctaaatatgccaaaattcgcaaagaaaatgcactactcgtctctgtccttactagttctcgcgaccgagaagatagaagacttgattatcttgcttactttaaggatattcaagataggaatcatcagagagcacttcttcgtcaagttcatctccgggctgaagtccttgtaaatgatattttattgtctaaatcacttcctcctacatcaatcgaacttttgtaagtagatgatgatgaagttcctcgttctgatgacagtgattatgattattaaagtggtgaagataatagtcttttggaagatggagaagagattcctcctaaggaagcaattgctagtgctaatcaagatgaaaacggaaaagaaatctcttctgaagaagtaattgctggcgataatcaaggtggcggcgaaaaagaagtccctctcagaggaattattgttggtgaagatcagaatcgaaatgaaagagaggttggcgataatgagaacattggcgaagaatgtctattatctccttctactggaattaatactgaagcatgagcttcttatctttttctatcttcttgaattgtctcatctttattattttttgcgaatagtattcttcaaccaactttggaatcaattttcccttttagtattttgctggtgagaaagataatgcctcttgtttattgattcccatacttgcctctcattatatttcttgcgagaaatgatctgttatgaatacttataaatattttattttgtcatgtggtcttattttgccttcctaattaaaggtcttattatgccacctcttgtcattgcgaccaaatcgcaggacgttcatgtactttcatgcaagaacccattgatcttgccttaactttttttttttgtattatgtcctcttcaggaatgttgcaacaatatgacatgcctaaatattcttgcgaaaataaagccccatgacattgtcgtcttgcgacgaaatcgcaggacgtcttcgcactttcatgcgaaaacctattgatctcgtcttatctttttcttttgtattatttcctcttcatgattgttgctcaaatatgacaagccttaatacccttgcgagtaaaaagcctcatgacatttgcatcttaagacactcatcagctccctaatggagggtggcaggcttctaaaaggtcctaaaaattatccccggcagcggcgccaaaaacttggtagtccccggcagcggcgccaaaaacttggcaggcctcgaaagggtgtatagaaatgaagcgtgataaaaacgggggcctacagtaataccgcaagtgcacggtcgtcagttgtagctcgtgcaagtacgggtcgatccacagagatcgggtgtgttttggaagcgttttagctatttgggttcctagatttgctttgggcttagaagccttttggcttaaattgggcttgagtactaatgggtttgttcacaataaaatgaactgagcttgggctcagtttggtctttgaagtgcaaatgggcttaggccttaaacttaggcttttgattaagcctgaattggattgggccttaatgaatttgggctttggtcttggtcttctgatgagcccaagttgtgctctgggcttttggttttagaaactgggcttggttactgaggactgggccttagtctttttggaatgagctgagctttgggctcagttggattggcctttgcttggctgcaggaagcagaagcaacacaaatgctgcacagcagaagggcagcagcagagttgtagcaggagagtggaaagcagaggctgcagcaacagctgctgcagcagacaacagcaacagtaatgcagcaggggagcagagaaagcaaagcagcagaggcagcagtgtagcagaaacagacaaggcagtgcaagcaaaaacaacacagggcaaaacaaggaacaaagcaaaggaaaactaaacaacaacaaaacagtgaacaaaagcaaaacaaaacaagaatgaaccaaggcctaaggccaagggcagggttgtagtgaagctaacagaacaaacatagaaaagaaattgtggatgggaagtgcagggagatggatgagagtttcctttacctagccagttcacctaggttaagttcttgtcaaatgcctagttaaccaaccttacagccttagctaacccctagtattggctgtctgtttaaggcacaaccaatcacagactaactaggcagtggcttactaactaatgtagctaattaattccttagaaccaccactgacccctagcattagtggtcttcttacaacaccactaatcacaaatcagttgggcaattaggagtctaactagcctaagctattttaagttcagcaaaaaccatcctaatagctaaccatcatggttcagttgttttctcatcctagaggggaattagaacatgttgcaacacacaaactagttaacacaaatatgacatgaacaatacaatcacacacaaaacacaaacaggagacaacataacataacaatttttacaacataacaggagcatacaaattaacaggagacaacagcattaacagaacatggacattaacataaaatagcattaacaggaatataacacattgaactgaaattaacaggatattataacactcaaaattgaactgtggactaaagttgaactaaaattaacaggacatgaaagtcctggatgttggctactccaagcatagtttctacaacacacccacaccacatatttatagttctcagacacaatttccctaaatacctaattcccccaaaattagggtttgttcttccccaaattacaaaaatagaaattaggttgtctcaattacctaattcatcgtgatagtcgcaacccatgatgccaattctctttctctacctctccatagccttgttgtccttgattgatgacatgaaatcactctcatcaatcccacacgtcactgaggtcgtgtgatgttgatgaagggattgaaaatcatcatgatagttggtggtgaaggtgggttgcgtttgtaaggagctttggtggaggtgtggtggtggcagtgaaggtgaagaaggtggtggtacggttgcaggggaagaaggtggttctctgctgtggaggtgatggaggagaggctcgactgagtttggggtagggggcgtgtttggttaggtggtagggctcgggtgctagggtgtgaggcaaatgcatcgagtcttgatgttctgtgactctgagctgcgagatgcgaagctggtaggtggatcggatggtgatgtgaagtgaagcttgtagcgaccgtcagattttttgatacaacgaagttaacggctctagatggggttaggtgttgtagtataaggcggagatatcaaacgttgatgaacagcaagggagagaccgttggattcaactaccatctaatctgaaggcttggaatttcagcgctgtggtgctcggcagagacttcagattttgatgctctatgaaggagcgaccgtcggatgcttctgagaactgatctgatggctgagaacggaggcgctttagtgtgtagaaaatgaggttgtgcgcaccatttttcgcggcttccttgcgtaatttctcccggctattcactacttttctgctcttttcgctccgcgactcatccgaactttatttattacctaaaaatgcaaaattaattaataaaaatatttattcttgaaaacaatgaaaatacagaatatgggataagatgtagaattaatgcataaaagatgagttaatgccaacaaaaagggataaaatatatacaatatttggcactcatcagagggtgccgcccttatctcccccctgttttctccttcaaggaggcgtacttctaccatacaaggttagctcctcccatccagtgttaacaacaaccagttgttttcgcagcctcttatcccttttacctatagggtttatggttacgagactgcaccctaagtggggttttcttcaggccgagtgcagtataatccaagacttgtcaagaatggcaaggtgctctctagacgcccctggcactcttgactcaaccgtgtacctcggcgccttgatcagattctgcactccttgggagagcccttattaccttagtctcccaacctaagtcatatgcttaagctgagaatccaaggtgcctctcccggatgggatttattgaccccaaatctccatgaatcaggttccggtggcggtgtagcctttccctgagccatgcaacaggtaaccccttatatgacgtactttaggtcttacatttgcctcttgcgaaattttattcgcgaactagggtgtacgccataaaggttcgcccctttcttttatgtcattgttctatgattatctctgcgaaagtttcgcacatcttgatcttgttttgatatgaataatctcgcaactattctttcagaatccataacttatcaaatattcttacggataatatctttttaagtacaatctgttccatggtctgtcaagtctatgaccaacatctctaccttctggatccattaatttataagctcatgttccaactatctccttaatgatgtaaggtccatcccattttttcgctaattttccaccattttctcgctgatataatggtgtctctggcataactaaatctcctggttggaattcgcgtactttgacacgtttattatattctcgggctaatcttcgctgttagttctccatatgttgtaaagctctttctattttttcttctaattcatcaagtttgtttaagatcaaacccgcactaagatttttctcccaagcttctctctttattgtcggaataacaacttctgttggtaacaccgcttcaactccgtatgttaaacaaaaaggtgacattccagtagcttctcttctagttgtattataagtccatactgcattatgtacttgttcgcaccaagctctatgatgtccttctaatttcttttttaatatatctgcaattgttttgtttgttgcctctaccttcccattagcttgtggatacaaaggagtagactttccacattttatcttaaatgcattaagtaacatttatatgttctgtccttcaaactgtttcccattatcagataccaacttcgcaagaattccgtatctgcaaatgatattttcgaatatgaatgtaaagatatctttgtcgcgaatatgttgtactgccttcacttctgtccattttgtgaaataatctgttgcgactattaagtatcttctttatccagaacctggtaaaaatggccccacaatatctaagacccactttccaaaaggccacacactagttgaagatgacaatggtgctccaggtgcatgtattttatttccatgccgttgacaatctttgcaacgtcttgatatttgtcttgcatcttcgtacatgtatggccagtaatagccttgcatttttgctctatgtgccaaagatcttcccccgctatggttgctagcatccccactatgtaacatttttagcacttcttctccttcctctcgtgtcaaacatctgagtgatggtccattaaagtattttcagtatagcagcccatctcttaattcataaatcgttacgcggctttttaacttgtgtgcttccaatctatttcttggtgtttctcctttcgccaaatatgcatgaagttatgttctccagtctgcgatattgttcgtttgttcttcttcttcgccgtctattatcatcacgttcacttcttcttctgctttattgattgatggtgacaaaagtgtttgtatttttatgcatctggcagttggatctgtcatcatgcttgagatgaaagcaaaagcgtctgagagtctgttatccttccttgaaatgtgcctccattttatttttgggattttcgctgacaattcttcaacgagcttcttgtatttcttcaaggatggttcatttgtagtgtactctccctttatttggccaataactagatgcgaatcacttgtcatcctggtattttctagtttcatttctattgcgaactttaaggcatgtatcacaacttcatattccgtttcgttattagtggatgcgaattccaatctgaatgaaaaagccatcttcactccttctggagaaattaaaacaattccaactccattgccttctccatttgatgatccatataccaatatctcccatctatttggttctgttaataagtattttggatctccgtgttcttcttctatatctatcatttcttctaccgcttcatcttcttctaaaggaaattctgccaagaaatctgaaacaacttgtgattttggtgaagacaaaatttcatatttaatatcaaagtggcctacttgttcattccatctctccacccttcatgatcttttagaattcttcatcactgattcaattggtacttttgttaatacctttatcttgtgcgcttgaaaatatatgcggagcttaaatgatgcataaactaatgctaagattaggttctcaatctttgagtaatccttctcggcagtattaaaagttttgctaatgtaatagatggttttctcgactcctgcgtctattcgcaataacacgaaacttaatgcatgcgacgtcgtcgcaagatagattaataattcttctcctgattctgctttttgtaaaatagttgtattcataagatgttctttgatcccttgaaaatctttttcgcattcatcagtccatttgaatttcgcacccttcttgagtatatcgaaaaaatatttgcatttttctgatgatcgcgaaatgaatctccccatcgaagctaaaagtccattcaacttttgtacatcttttattgttgcttgtgttggcatgtcacgaactgcttgcactttttctggatcaacctgtattccttcctttgatacaatgtagcctaaaaagttttctgatgcaactccaatagtacacttctcaggattcagtttaatgttatactgccgcatttgggaatggtaagctgttgggatttttcttattctttgtttaaatagtctcacattcttgttaatctccaacttgtgacatgtaattgatggatctattccctgtatctcatccatgctccctgcgaaaacgtctttatattctcgcaaaaggttaaaaattctttcttcttcttctacatccatcttggttccaattctcaatattagaggttcttctatagtcccaacgtttacttcttttgttggttctgcggcagtgtaactggacttaggttctcccattggtgttggttcttttattattttcacgggtccttctccttcttccgaaatttcgctgggtattcccctgccttcttttgcccttatcgtgtatactctaaattcttcttctttctttgcctcctttgccaactttctgtgaaattgtttctttttttctcgtccttcataatgatttacttcgatttggtgacataatttcacattgtcaacatctcctctgatttcacttattccatttggtgtgggaaatttaatacattgatgcaacgttgatactacagcttttatcgcatgtatccatggtcttcctagcaacatattatatggagattccatatccaccacgcatagtgtcacgtgtgtttcgatctctcatagtggaattcgtaccactatttctcctttaggttttgttgtggattttccaaagccacgaacaagatatgttgaactggacattttttcatctttaaatcccattcccctgaacgcatgataaaatattatatccactgaacttcttgtatcgactaaagttctgttcaatatccattcttccgtggatttttttgttgccccttctcttttcgcgtaataggcactgtaataaccaatggagatgtgtcgttcaaattttctttcggtatttctgccgccatgaatgtgattttttgcttttcccaatctttcaagggtgatgtcttttctaccgccataaccttccttccttcaaaatttcgtttatgtattcttcctttgatgttttcatggaattcattaaccatggtttttgttatcatattacactccaatcttttatcatcttcattgactctaatcatttttcttttaactggttcactgatttgtttaatcattttcttgatttgaacaatctcaacaacaatcttgaactttcgatcttcagcctccctgtttctagcgccattatgtagttgcaggaaatcctacactacactcttcataagatttcattaacattcaactcattttagattaacaatcctaattttattgatcaatctttgaacaattttacaagaaaagataaaggaatcaaaaataaccattgttatagattttctctctcctatttacttgcttctcactcagaaaaatatctctcattttcctttacaactgagcggctatttatagggaattacatagtggatgacagctaatctgtcctatattttcggagatgtcttgcgacattctcgcatccttacaaatgttattctcgcaaactctctaattttcgcaggaccatcacatttttctcatgattttagctgacgtcgtttattatgtcatttttgaaattgttctgcgacgctgttgtgttgtgttgtgttgttgataatttcactgagacattattgcagcgagattctgatcctacaaaaatatccttaataaaatgaaaatataatatattaagtttgattttattacctttgcagcacataaccgagcagcccatgatgactggtaaccaaacaatacagatctatttcttgtctcaccccaaggtctcccattcctattgggaggtaaaaacaccatagcatcgatgatttgtcttgcactttcttttggtggatacatcttctgtccctccttcttatcctcctcaaccgaagatttacctttattaatagcagcaccactagaagttccaacttcagttcatccagtaacatcaagtacacattcatttcctccagaaactccaacttcacttcctccaccaactccaacttttgttccttcaccaactccaacttcagttcctccagcaacaacaactccaacctcacttcctccaccaactccaacttcacttcctccaccaactacaacttgactacctaaagcagttccagctccaactccatctcctccaccttcactttgtccaccattcacaactccacttgcattccttgcgtttgcactcaatggttttgcatgacgaggttgcggagttggtcactatgaggtattacttcttgtgaccttttttttttgatctgttaaaagttgataagtaaaaacgactgggaaattttgacagaatcaagtcgtgacactgaaaacggttaagaaaaatggatagtaccagacccaaaaataattacggatgggaaatttagtagtcgatctagacgtaaaacaaataatgtctaacaaacataatttgcgggttggttactcctattacggatattcagcatcgtaacacatacggctaggaaaaaccaagccgtaatataaaatcggctaggaagctaacgattacgtttaggaaacaaaattacggtagaaagaccgagacgtaaacactagtgctgaaaaaaaaatcgaacacaggagaatatatggctaggaataacctatccgtatacaacttgttgcggataggatttctcaatctcgtacgcatcgactattttacgactgggagttcttatacatcccaaccgtaaaacttaataacggctgggagttcttagatatcccaaccgcaggacatatacacggttgggaaaacaatacatcccaactatgaaaccttcttacgactaggaacacaaggactcccagccgtaagcattttcagaaaccgttctttcagaccaaaaattttcgaaaccaactgaataatcaataaaaagcttaaataaatactgggttttcaattcataccgtattgctctcatatcagtagtctcggcggctggtgcatcttctttattcagttcttcttgatcttcagtttcatcttcaattgatgaagtttgttttgtctgcttcaggaggaggtggattccacgaagattgacctagcttttccttaggtttcatgattttatacaatgaatttaatcgacgacgattttttttttttgaatcgacgattaatcgtttgtttcaaacgaagaatggaagaagaagaaggaaaacagaaagaggggagtgtgggaagaagtagaggcaaaatgaagaagaagggaacaattttgttcttgggttttaatgttttcagtttttttttcttttaatgatttttcagttttttttcttttttattagattaattagataatggaatgataaaagggtaataagtaaaaatgattcagagtatttttgaacttttacatgaatctggtctacccctataacatatgggttccacttagaaatttaaacccccaaaatctcatccctgcagccccaataatagaattccaatacaaaattagtgcaaatttcatcggctaataaataagattgttattaaagtacccaacattgaagatcggaaaattaagatacaaacatccacaatagcctggataatctgtaatgttgccacggaattttgcacaactgatggttttatttgcaggaccctgcaaaacccgagatgactttgtttacatatatgcaagtgtaacaaaatcacagttcactgcattatacaatcaaaattgatttttagaataagaaaataaaaacacaccaattaagagatgtgatttgcttcaaaaaaaaaaaaaaagagatgcgattttcttgacttcctttcttgatgataaaatcactcaattatagcaagagttaatatgttttgtactctgcatggttagttccgttttcactaaggttgtgtttgataacatagaaaggaaacaattccatggaaagtgtttacgtggaatcagtttttttgggaggtaaggaaagactttccatggaaatccacggaattgaatataaaacatattttaggccacgcttttatttcgattccatggaaacagatttttgaccaaacgacgaaaaacacgttatttccatgtaaaaaaggctaattccatggaattgacacctatcaaacacagcctaaatctctacagattttcaaattagtattgaaacaacagagaagaaaggaaatctaagatcattgatttggtttatactccttgcgtctctaaaacatagacttgtttggttttataaaaattaagaaaaccaatcattctagccactttttcatgttttttcgtgatctatccttggtccccactcatttgttataagagagatcgaagagagaaatggtcccctttaatattaagagagaaaagggagagagagaaatgatccctctatggatatactagtaaaatcataacatttaactttccgcgtatataaacaagcctattttttgacatacctaaataaggaaacaatcccatcttttagagacggagagagtaagaatcatcgtacgttacctacttgttgccaatgtctacctctccgtgttgatcgcagagaaactgtttccgagaactctatataacaactattttttcggctgctcaatgatataagacatgactgatgtaggaggactactgtatactgctggttatttgcaaaaccattttttacggacaaaatctttatagagaaaataatcaaacgacgtgtcttttggtaaaagattagaatataacgtatcttttggaatactgaagttaagggcgacttaaaccaaaagacgtatttgtttctagagaaaattaccaaacgatgtgtctttttagataccgaagttgaagagcaacttaagccaaaagacgcaactgattattctgcgactcctgcgatttcatctggggagccacatcagcataagaatttctctttgtatgacatggcaattgacatggtgctctattctttcagcgtttctgaaagtgaatgttgtgacgccatatcggatccaaggatttccctttatataagaaagaattcatcggtgttccatcaaaaatggaaaatgtgctccctgaaattggttccactcaaagattcctcacaatgtgagggaacccaatgctttgttggtataaaaaatcgcctcacatatttctttttatttggtcctatggcattgaacatttctccaaaaatggttcacaaatcctcttattttttcggtatacggtaatttgggtgtttttgttagcggttcgtttggggacccctccaggtacaaggtacttaggcttagtttggtattgatgcaacttttgtaaaaatacttttctcttatgcgttgttgtgctgtgttgtgagaaaaaagcagttagatgtttggtaaaaaattaattaaagttaaagctgattaaaaaagaaattaaagtgtgtttggtaaaatatgagattcaaccattgttgttgtaccaaatgacaaaaacagacatttcacgaaaaatagttttattcaatcttatttatttttttattttttttagttaataacaatatatttatatcatatattgaattaatcattatacaaagcttttggttggtaacctagcaacaagctgggctccaacacctttttgaatagcaacgcctaatctatgaaaaataaagctaccaaaaccactactagcgtcgttactaactaaacaattcttcaggcgcttgaaaaaacacaaagtatcctcacccaactctcctagagtagagaaagctagaactttcaatcttatttggtttaaaaataattagtttttaactattaaatataaatatatataatatcaaatttattaattgtcactattattatgattgttaaaaaaaatagtttacttaacccactttttaatatatatatatatatatatatatttatatatacatatataattaaattaaattatattaaatccattaaaggatcatacaaaattttggtgggtagcctagcaacaagctgagcaccaacacctttttgaatagcaactcctaatctgtaaaaaataaacctacctacaccactactagcatcattactaaccaaacaattattcaatctcctaaaaaaacaaacaatatcctcgctaagctcccccagagttgagaaagctagaactctcaaaccatacccgtgtgagacacatttgtccaagtatttggtacgcttacgcgacacagcattcgaaatagcttggcccggaacaaaagcacgaatgccttcccctgtgaagggtgagacccccgtgacattcatacaaacatcctgaccattttcccaatttagaacaagaatatctacggggcgtagaattttatatatatatatatataaattttatataattataattttcaaacaaaaaaccaaattaattttcaaacaaaaaaccaaattaaaaaaatgtttatttaatatttttcttcatttttattattgacaaattaaatgaaatggtatataaaacagtttaaaaataaatataacaatatataagaaataaattataaaaaatacaaaattgattgtatacaaatttaagggtaacctttgaaatttaaaaataaggtatggacgtattaagtttagatgggaccaaagcttatgcttttgtagcttttaaaagctccttctccccagcttttaaaagttgagggatttggaaagtgctttggataaaaaacgcttttaatttttttttaccaaacactaacttcaaaaattattgacatacatatattttgaaagtgcttttggaaaactaaaagcattaccaaacccagacttaatgagccccacattccattcgaacatgcatttcaaaaactcataaacacacaaacaaattctgctacaaaacaaaaaggtagtgataaaatctctgtggcggatatttatggacgtcttgcattttcactgaaagcatgatgaagttgaaccctatttctacttctaatgtgggtcagacacttaataactttacatgtacctcttcagaagcttggagattgaacgctgattgtagaactagagaagagataaaagagaagggagcggaagctgcattccaatgggcttctcagtggagtggtcagaatattattttccaaagtgactccgaacccatcctcaagttgctggctggaatatatgcaaaagctagagaacaaaaattcaagattagtggtgactttggctcaaaccctaacaattgcataaactttaaagtgaaaggttttatattgaaaaacagattcgtaatagcagaagcagctcatatttcttcttattgtgataaatttggtataactaaatactggacaggggagatctcagaacccttctaaacaaactagaatttcaattctagaatgaaattgtagtcaactttcttcctcaatacaatgagatagcagaaaatttaatctatgactgaggatcatcctctttttcgaaaaaaaataaaataaaaattgaaagcatgtgtcattaaaacttcgcagtgatagaactactgctaatatttgcaaacatctccatccacataaagtttggattatctcaagcgtggcccgaataaatattagtgcgggagggaaatccaattaatatacccaatctagatagtttattataacaaaaattagtgcaaaattagtaaggaaaacacaaaattggttaaaaagacaaaaatcaagaattcctgggtgaaaaagacttgtacattttgatacagttcaaatggacaaaaattaaaaagatactgttcaaatggacaaaaatataaaaatagtcaggatgtaaccagtttcatcctacccgttttcatatattttttcttatttgtaatttatatcaggatgcatccagtttcatccttgctattttttaagtttaagccgcgatgaatccaatttcatccttgctatatttttttgtccatttcacccatactaatttttactcgtccatttgaatcatgttttaaaaatttttggacaaatgttccattttccgtaaggaaaatctaagaagattggatcaatgttggtcctatgtggcacgctcgtcgcctgccgaactgtggtagctactttcagtgtgtcaaatttgaaactggtacttgtgttgccaaatcattcagtaacagttctcttgtcacagtcactggaaccatataatacttgtacaatttctagaaaccatagcattttggtaaaccaaaaaaccccgtggacatttgttaaccaaaaaataaaaacgtggctgtttggttaaccatgaccttttcacggttggccgtttccctctatccatctcatgaacgcttgaccgtacgtgaaagcggaacctcactgatgataggctttcacgaccgagaaactaacccatttcctaaataggtgttgtcggaaagagttggtaccatggtacttcagtggctttaacatttcagtgcaaaaccaagtaattaatcgagcttttttctcaggcaagggaggaatcaagtgtggacaaatggtgggtaattttccacgaaacatgaaatcaacggaggaataaaagaaatcagatagaggaaaagaaaaacctggttatgagaacatattcatagtactcgtacagtcatacttaatactactagatagttcacataaaaacagtcacacgttacagagcacgcatttattttttggtcgattgacaaagcacacaatcaaaccaagcaaaccacacaatagttatgcaggccatgctaatcataattgacttcgcaaaccacacattatattaattatacatactatccatgctttacataatcgacttggaaaaccatacaagtaattgcaagaatccatcatccacaagtggtgatagttttccaagaggtatgttgcggttgccttgttgacaatattacttaagatatagcagtctttgttggtggtccattggtcataaccaaggaaatccttgtctccttattgttcactacagctcgatgaaccacggttttgtacttcccgttgctcagtacctacacaaccagaaaacagaagagaataaaaagtttatactcatttatcagtatcaaaagcgaacgaaatatcatgcttagagcaagaaaaagtttatagacaactttttcgtgtatacctccatatgatcaccgatgttaaccatgatagagttgggaattgcattcacagcaacccatttccctttgttcttgatttgtagtccaccgacgtcattctgcatgagcaaggttagaagaccgtgatccgcatgtgggggtaaaccaatagcaagctttggctgtgggcaaggaggatacaaatttgcagaaaacttttgaacaccagatttcagttctagtgacttttcaatgtcatcttcctctagttctagaccctccattatcgccttaagcaattctttggttatatctcttgatcttttgctgtactcacttagcacctcactgcataagtacacaaaatcaatgttagccaggtgcatttacagaccttgtcaagaaatgagttttgattatggatatgcattcgacgagttagaggtttacctcaaaccctctggtttaggaggggaatgaaacactggatgcactaagactctaagataatccctccaaaaggagacactctcagaagcagggttaaagttggttccacatagaattgggtccaaaatgcacgggtctacagcgttctcgacatcataaacagacttttcttccggacttaagtcgaagaaattcatacaagatttgatcaattcctctttcaaaccctctggaactccatggttagtcacctgtaattgttacacgaacaacgtcattagatagtcacttcaacacatgtaactcatgcacacgcacaaaaaaaaaaattatagtaatacaatgtctgataatcataaataaactattaccatgaagaatccccaatgcagacatgcagttcgaaggccttcgataattttagacctttggtcagtggaaccggtagtgaggagcgagaaatcaatgactggtagagtcacttgttctacttcttcttcagctaacagagtgaaatcgtcagcttttgcagagagtgcatgtttggaagaaagagaaatgagatcagttgattcaatcaagtctttgatcataatacccattttcagataaatattattcttcggctcaagatatcagtatgtattctttagctcaagatgaagaaatgttgtggttagagagagttagagatagggatatatataggggagggcaagaggatgtcccttgctgaattagtgacacccaataacaaaagggaactagcctgataattcaatcttctgtttgccatcaactgtcttctgtttgccatcaactgtcagtaatgtaatccacaagaaaaacaactatgaacacagaaatcacgatgtataagagacacatctcaccaacccggccacactcgtgacatcattccaagcagccggtgagtcactactgggaatgtggtcccccctgttgcatttcgcactgtgtccttcaaaacgcagtttcattttgttagtatgctttgggtcttgttaagctgttcattctggccgaagctggcatcaatttctgggaatgaggtaccacctctaatgtagctttcgcgaccgataactggtcccatatgcaaattatgaataaatgatgtttccaatttggatagtaggattaaatatttgtgatctagtataattcaaggtttttccaggattagcaaatccaaggagcccctcttggtatcatgctagtttgatcgatgagccggatcacattggtcctactaccaatcccttacttagcaattattgaaacctatgcccctcttggtgacatgctagtaacagaagctctcttgttttacacgttcaactaacactacaaaacagaaggcttcttgggacggccaaaaaacgtcccaagaggacaaaaaaccgtcccaagaggtattagggacggtttatgtaccgcgccctgttccaccgtcactaatactatttgaccatgttttttttgggacggacatattttagtcttgatttaaatattttatgattattatggacggtcaggccatcaccgtcccaaatatccttctttagggacgggtttttcaaaactggccgtccctagaagcctccttttttgtagtgtaatagtatccactagataaacaagtggatgatgagacacatctcggccaacccggccaaactcatgacgtccaagcagaaacaatggcattcaaaaggccccagtacgacacatattgttatgacagtagaaattactagacaggcatgatcagtaatgcgtacccacaaaaatcttcacacaataaaatgcaggacatgggtgtgttggtgacaggattgctgtgaggttccacttctagattcattttcttcctttccgaacttggcgttcatctatcgccaatgacgtaccccttcttgtgtatgattcataattcatattcattttgttaaatcctcactgaaagaataccgtcattgtttagcaacatcagatacgaaaaaaaagaagtcacaattgaaattggtcccgagtgcaaattaagaactaatgatgtgaatgatattggccattatggacctcaatcaaatccgctgagctaccaatagagatttcttagaatcctgcaaaagttagtgctaaatctagataatttattgagtaaaaaactctttcttttttttggatgaccctacagccaagaaaagaattataatttattaacaattattgagaagatggcctgttcttcctccctcttggattataaatactcaatgaaaagaacataggattccatgtgtactatctacagactacagccatattgcacaaatgcatcacattataaggaaaatccaagcttgataaccagccatgagtaacattataatgctaactgcgtctctactgcaacatttacctgattctatctttcacctgaattctctctttgcatgcggatttgattttataggctcgtatctgaatgacccaagaggacagtagcccggtgaaattcaaaaccactagcccaatgatcaacagtttcacagcaaagcttaaaataatgttttggaaaagaactccagaataagtaacacgaccttgagaaaatgctaaagtaaaatctggacaagtcgaggagttcagcgtgattttcttaataatgactagcgtaatcagtactagtatatgaatctgtctgacggaactttcctgtacttccctaatttcacttattctctggtgtaaatattttttcgtttaaacatgttgattatgttaatttcccgtatgtattttatgtttgtttcattttagattaaggttgtcaaagttttgcaggctttgaaaacgtgctggaaccaaaaagggtttcatcgtattatgttggaaccaaaataggttttatcatattacatatgttttcatctgcaatatgttcggaccattttcggtttcaaaattgtttacagttattttttatggattcatctgtactatgttggaattttttcatttgaaagaaatcagacaactgaatcaattctacaagacaaagtaaatttgacaattgaaaccgtgcataagaaattgaaatcttttataaactattataagtattttgaatcgaaacatataatgttgcaaaattctattacatctagttaactagtattacaactagtttattcatattgttgtaacctatcctctacatcatatttttccagcagtccttcattttctctagaaatcatattgctaccaacagttttaagcttttcgatcaaagttctcacgcgtcggtatttggctatataagagttttcttcagaaccaacattctcttcactttgagtaggcattacattgctagtaccagcaatctcctcatttgcgagatgctctttattcactacacttccagcaccgacattctcttcacttccaacaacacgcttttcatttccatcagcaacctacagttcacgatcaatatactcttcaacactaatatcctcttcccatatgcgatggacaaagccttgttcatgttgtccctcctttttgtatcaaatcctttattgcagctgcttccgcgcacaaattatgcatcgagcacctatatggccctgtttctctttttttttttcccctattgtgaaaccaaaagtaaacaataagcaccaacaaaatgatgaaactataactgaaagatgatgaaaccataactaaaaatggtgaaaccaaatctggttacatcaagcaaacatcaagtaagcacactcaacagaaaacacacccaacataaatatgtaaccataagtggagatagtgaaaccaaatatggtttcatcaaaaaactgaagacattataacacgccaacagaaaattgtcttcaatgtttttactcaaattcgacaagggaaaaatgatgaaaccaaaaatggtttcatcaaaactatcagatttaatcaacacaccaacagttttggtggaaccaaattcggcaagggaaaaatgatgaaaccaaaaatggtttcatcaaaactaccataaacaatccacacaccaacagttcaggcattcgataagggaaaaacgtcgaatccaaaaattgtttcaacaaaatgaccagaatctaccaataacaccgaactatttctactggaattaaatctaacagtcgggaaatataagaattgttcatacggaccattaatgaacaataatcaaccaaaaatatgaacaataataaataatgatcttattattgatcaaacaacatgagacaaatgattcgatttaccttttggaggatttttaatcgtcttcttgagttgttcatctttcttgctctcttgttgagcattcttcttcaccattttaaccagtttttgtgatttttgttttacttttttgaatttcggtcataacttgtctcgatctataatttctagtttctaacaatccatatctggaaaaaaaagaggttccattagaagaaaataaaaccggaagggatatgaatttcgtagatctatatttattttttccctaagagattaagaaagagaattagatgaagatacgatgggggtgatttgctgtttgtttctggtatgaataggtggaggggtaatgtagacagttctggaatttggggtttttattcctcttttattttggtggagttatcttatatggatattgacagccttgtggttgtaacgcgtgtgttatcttcaaaactagtgacaaaacacctaggtgaccaactttgtggtacaaaaaatctagtcatattatttttaataaaattaaaacagtttcattaaaaagtggtacaaaaatcccaggtcaaataataatgagcaaatttggtttttgttactttaaaaaaagccaaacatacccttttagctttttcttcttcttctctcctttatttttcttctttcttctatctccttctccccaccaccattaccaccaccatcaacaatagatctccacgaacactagcagaaacacctttgtgacctccacgaacaccttcgttcgcctccacgaaaacctccgtctcttttctattgttttattctcagatctatcaccaacagtagctccgccaccaccaaaccagccgctatgtccatatatgttaccaacaacacctatatttcatccaggaacacctccttctcttgtcttctagttttttgttcagatttatcaccaacagtagcttcgccaccaccagaccacctgttatgtccagatctgccaccaataacacctccatctcctccattaataccatcatcacaacttcagcctccttcttctgtcatctaaaactaccaataccttcaaatccgccactaacacctcatcctccttttattctctataataaacacagtacttgtagatccgacctcattcaatcctctacaaccaccaataccaccagcttctgatgtatcatcaccagcaaatgatgattcatctttatcttcaaaaccaatatttgtgttggggaaatgacagatttatgttgaaaccaaaatcggtttcatcaaattcagacagttttggttggtgaaaaacagtaagttcataaactttcctttctatcatgaaaccaaatattttaatgatgaaaccaaattttggtttcaccggatttttgcctagtttattcggtatgacttggaagacggcgtgtttggtttcatcattgaagttatttggtgaatgacaatatgtgggaaaatgatgagacctaattaggtttcatcgtattgtttttcattttgttgaatattgatctctatgaaatcaatttttgatggtgagacacaggtggatcgtttttgttgaaactagttttagtgaggaggtaatggtagtggtggttgtggcagcgatggagatggtgcagttgacggtggtggtaggtatcatcttattgtgtttcatttttattctttcttccttctccttttcttttacgatgaaaccaaattttggtttcacctgattttttcctattttattcaaactgacttggaagtcggtgtgtttggtttcatcattcaagttgtgttggtgaaatgattatatggaaaaatgatgaaacctaattaggtttcatcatattttttcgtttttgttgaatattgttctctatgaaaccagtttttgatggtggcacacaggtggatatttttttttgttgaaactgattttagttgaggaggtaatggtagtggtggttgtggcggcgatgggggtggtgcagttgatggtggtggcaggtttcacttattgtgttacattattttcttctttcttccttctccttttctgttgtggtggtcggtgcaacggtggtcggtgaacggtggtggttggaggtggcggcgatgaaggtggttggtggtggtggcggcgacgatggtcagtggtggttgtggttggcgatggcggcggtggcggtagacggaggcagtcggcggtggtggtggtcagtggtcagtggtggtggcgcggtggtggtgcttctgctagtgttgttggtgctgggttatttgttggtagtgatagtataataaaattgaaaggtggggttgatttttgtttttgttgtggtgatttaaattactaaaagggtaatgtagagagattatgttaaatgtggtttttgtgaacaatttgttttgttggagcttttttacatggatagtgacatctttggggttataactcgcgacccgtattttctttgcatataaattgagtgatgggtgcacaataataaaataaaaccgcgttaggttaggaaattgagttaggtttcggtcaaaaagagaaagtcgaagaagaacggctccctctccagtaatcggagaaatatgagcaccaccatgatagataaggagctggaggcgatcccgattggccccacaaccatttctttgcactttaacggtggagtagttatagctgcccatcgcagtggaacagttgatagcgatactgatgtttatgaatattgtgaagacattggatttccaatgaaactaggaatgttaggaactactagagaatctagttcttactaaaaccttttaaggagtataagtatgaaataaagcagcatttttatccatatgagtggaagctacaaaagttatagtagaagaatcagaacaattggttatgtattcacattgagatggagtagataaaactaattgtgatataacgattgataattttgcgtcagttgggataggaaggttgctctttgttagtaagatagtttctttgtattgttaggcattttattttctatttgcttttttttgatagattttattgtttgactatataatactctttacatgaaatgacactggaaagacaagggtatccaaatacaccacagtctttttatttcaaccaataagtccgacaccaagtttgatcatctactaagttgagataatactacaacttaatatatatatgataatagttacgatacttaaaccgattaacgtaaaagtgtatttccttctaattataataaaaaaattataattttggaatgtaaaagtaaacaacatagaaaagatttttttaacgaggaaaccgcaaatgtaaaaaaactccgggacctagtgcagttgtgaatactctcataattaatccgttgtacaaagaacaaaatccaacttcatatagttgagaccaagtaaactacccctagttacttagttcccttagtatccctgcgtcttggacctttttgtcacgcacgtgaatctgaagaaggaagtcactatcttgagttgctttacccagtaaagtcttatgtactcattccttttgatcgtattccaaacagtaaatgatcaaatttgtttagtaaccaattgaattatctttagtataaagatatgttgagtcgttgacaatgtcttttatgtttaaaacaataaactcctttgtccggtaagatcaatccaaatccaaaagtttagatctagattcactactatcaaactgtagtaaaccatctaatgatagttgtcgatcaatacgactataagatcaaatctatcaaagataaatataatcttaagtcggttcccagccgatcaagatgtgtgcacaaatcacgagatacgaaaactaataagaaaaatcacctttgtcttcaaatcttcaatttccttcttatgtacctgcacaaaacaacttgaatcctcttgtaatcaatcgcgcacagaatggagtctgttaataatggattatcacaagatctctttatatctaacaacagttctaaaggtcttgtcgatagtttgatctagtttgagtgacccttatgttagaagagaagactctcaagaataatcaaactaggtgcaatcatagtttcaataatagaaaactaaaataacaatgcaattatctagtttcccaccaacggtaatcgtagagcttcttaatttcacagaattcgttaaacgagcggccgtatgagatttcgcctaattaggggtactttcctctctatatagactgctccaccagaaacaacatgaatgaagttttcttggatcttaggatactttgaaagaaatgcaaactcaagtatttatagaccaaagttgtttggacaacaaggaaatttcaaaaccgaaagattctcaggatctgcaataagtattattttcggattttcctatttctaattaatgtcaaacaatatttccggaatctctcatagaaatttcttattattagtatagcgcatttaccaataaacatcttctatagtatgtgctttaattgctggtaagtaaaacatataaaatcgaaattcataactaaatgcttttcaattattttggtttgggatcaccttgagcatcaaggaatatctttgaacaattaatgataagagttatgcacatgttcaaataatatcgacatctagaaaattcctttcttagcaaaccctaattccaaattcacgcacaactaaaagaaatatgtcaatattaattggaaactcggttttgcttttgggaccggttataccatgaccggttattccttgcttcccaatactagttagggtcggttataccttgtcactattgcggttttgttccgtgtacaaaaccatatggctgaaaacatactttaggtaacagttttgcaacagaaaacagtgatctaatgctgtcaaaaccgtggctaaaaggaagtttcgggtttggaatgtctacaaggtttgtttggattaggaaacttgtatgacggtttggtaagtttagggtttcctaattaagttggaaaactattcttagaagttctctaagacttggggagcaaggatttgtatactatataaaagggtttatattgtgcgtagaaatcattctcttggttaattctcttgtagaatcctctctctttatgagagtgattgtgtcacaactgttgtgtcctacgatggtgggtgatgggacaaaattcatgtgagaagcgagacttgtaatgagaatgggtatgggagaaatctagggtttctagggttcgtacgggagaagctagaattcattatgttcttcatgttcttttctaaagtcgaagcaaccatggcagtataggtttatggaagaataagaacaaagggagaggtaaactcttcgtaatatgtcttgttgtttctaaagtttaccgctagtgggttacataactagtttattatatgatgtgtgcggatgtaataacttgttatgataatgaagattctcggggtggttttgtccgtgggtaggtgaaccacgtaatctttgtatcatgtgtgattatttattatcgtattatacattcgtgctagtattatccgatcatgctaatctaaagatgtaagagacggattcgagctaagttatccaaactaggatgtttcatggaattgacttctatggaaacatgccggttcgagattaacgtaacctcggtttcccgacacaagttaagatagtttatgatcggttataccttgtcgcacagtataggttatgaccggatctaccttgattttaaacataagttaacataggttctaccttgtcaggttgcatttgttatccaaatattcttcaatgaaaaaattggtccaacacacttattgatttccctttcaattgcgaaataagttcgtacgtctaattccttaaaccaatgtaataatacatagttttctaggatgaaatcacacctatatcccacacataatcaagtaactaaatagacaaattatgttgatgtcgtatttacaaacttcaaaatataagtgttatactttgtaattcaatatagttccttgatactttgattataatgatatgaacaattctaatcacttgagtgttatagcttcacatgttattttttaatataaatcgacttgaaagatacgttaggaatggaaacaagttcaagtcagtattactaacctcaagtggaaggacgatgtcttcgttgtagttacttcttctgattatttaagtcttcagagtaatacatgtaatcctaacactcctagactttctagtataacctaaaaatagttgactctaataattcatcaagcgactctagatgagttttgatactaaaatatgaaataccaacgcttgttgggttctaccgagctatgctttaataaatatttttctaaatttttttcttctataagggtcacgttgatttagtatagcttaaatccccccgaatacttggatacctccttgattattgctcacctttagattcctttaggaatttggttggatttaataacctgaataggatctgtggtatgctataaacatatgatggttttgaaaaagggcgaaaagggtatataattaaggtactagaagtagaagtaaatccactaaccacaagaaaattaaaataacttactttacttgtagaaattgttttgaaaatgcttagccaaactaacttttgagttaatatcgaaacatgttacaacgatggatgaaaaatatgatgatgtggtaaaagtggattgcagtggtaattattggacccttacgttattgtaagagcaatacataaacaatagaggaatataaacaaaccacataaaattgtagtgatccaacataaattgttggccaacaataagcaaccgacaaaacaagtactcgaaagaactttcttccatagacataaataacatatccaagaatcccaaattttaaaacaatagatgactgttaggaagatgcatacgtttagtaaatgtgtttgtcaaccttttttacaggaaaaaatatagcatttgataaactatatcagtaaaatgataaatctaatgttataaagaaaattataacatcaaatgaaaagagacacaatcatgaagtaggaagttaaatagagtaagcagaaaaagttaatgttggaggaacattttttttcgaaagagaagatgcaccagtcaagcctaaagcacgcaactctttagtatgcatcttcttcttcaacggttgctgcttcttttgtttttctcaagaacttccaacaatttttcgtagctttgatttatcaaaattgctagtaattatgagtgctctgataagttgcttgtgtaaacatatttcaaagggtgcaagcatgcatcttcttaataagtatgtacttgcttacgtttctctctagtttagaagcaatatattatgattacaaaaatggggataagttcatgaaaagggatctgaaggattaatatatctccccttgtttgtcaagtcatcgataaaagttatgatatcctcctattcccaaatttgaggaatagatacgcattcaacaaatatgttttcaatgttttcaaaatcttatccaaaataaatgtagaagttatgaaggcactcattaccaatgcaaatttggaaagataatgacgggaagtgtttctgaatatatttatatttttaaacattttcatttatttttctagtaaatatataaaatattatttaactaattctcatattcaggacatgaaatgaattaaaataaaaaacaactagaaaacatatataaaattgtacgtgaaatataaaaagaaatcatttagccactaaattaacaaggaatgactgaacttagattcatatagagttttagagatattccaaacctcttattaaacaatatgaattttcttaaaatctctgaaaatatatgttattggatagagaaatttttaaaagtctttagaattttttattattggatttagacatgatttaaggtttcgaaatatccagaaatttttatgataaaaaatataccataaaggcatgaaagtctctccaaaataggtaatatttatatatagcgacttttttattattttatttttttaagaaattcaatatcaaaaaaataataacaacaataaccaatcaaaactacaattaaactcatacaaaaaagaaaggttgaagatcaaaagattcaatacataatattttaaatcttccctaatgagttggaggtggaggtggaggtggtggctggtttggaggaggaagagaaggaggtgaaggccatttagcacgagtaactctcaactcctttatcttggaggatagaagttatccttaatgtccgctgcttgtggtatgagttcatcagcatcgtacaaatcccaatcagtaaaccactctaattcctctactttcagtttttccatatccttgttgatgaaacacagttgttttaagttgtcccaagaaattaatttggcagctaataacatcatattaaccaagattaggaacatcaagtagctctccgtcgtgatttgagtcatggaaaggttgatgagaactccagataaaactaaaaaagttgtggatttcactctcactttctcaatcagtgagtagcatgatttcaggggggaaaagagggagcgagaaaaaacatagagaaaaaaatatttaatgatattttccaaaaatacttaaattattttagtacaaataaaaattaaccctataacatattttattttgcctagtcatcattttgctatttggggtttggtacttgaagaactcaaatacgcggaatggtccaactttctaccctcctttgcatgattcacaaactctcctttatttgaacccatctgaagatgatgctcttaaatagtctctaaataacttaggtattttttattgggtctactatttaatatgtcaataacaatgacaatatggtaccgtggttacttaaaaaatcatcttatattgtaccccctcggacgaaggcattatggaatgaaaagagaggggatattaataaaactttattaactgctgaagcttttacggaagattctaactaatgacgaagaatgggataatatttattatccaagtataataattttattagacaagtataatgataaaaatggttattggatttcttactacatacattcaactatgtgtcctggtattaaatgggttttacaggaatccaatggtattaaatgggttttacaggaatccaataactatactaggtgggttgttggtactagaaagcacatttatgtgtggaagatgcttgagttcttgacgctggaattatcaagttttcccgcaaaaatgaatacattaaatcaacatactcacatgaaggttagtagtttaattgtcgatgaaacatgggttattcgtgaaaacatattacaactcttttctattgctgacatacctatattaaccaatggggaagataaacttatgtggaatgctaataaagatggtataagagaacatgttacaagaacccgtcttcctaagctaagatggtatatataatagaaactggaaaatttatgttcaccctacttcttctagcaacatatgaaaaataactagaggtgctcacctctaacgattacttttttcttttttcttttaaaaagaggttttaattggcctccaagtgtttcatctgtggcaagaataaggactccataaagcatctcatatcgaaatgtaactgtggtcgaattttttggtgaatttctttcaacataaatttttgattaaaccaaactcaacaccagagttttcacaatgaagtactctgttagaagagaaaaatctcaaataatccgaactccacgtatatgttttctgactaacctaaccaaccgaagtcaatatattggttttcagataagggttcgattaacaatttttttatttttatgaaccaaccgaacttagcgtttgttgttctatacaagagttcggttcggggacaaaattttcctactaacctaaccatatgaacaaaacatattggcttccagagagaagttcggatatatatatatatatatatatatatatatatatatatatatatatatatatatattatgaacaattcgaactcagcatttgttgttcaatgcaagagttcagttacagattttttttcccgtaatagccgaagtatattttgtgttcttgatttcagaatgttcggctaccaaactaggttttatttaaactactcctaaccatgatactgtaacatccatttagaccttattttgatgatttctactcaattttttcaataaaaaaacgaattaaaagtgattaatttttcagtcgaacgaggaacgtcatgaaaacagaaaagaagaagtgaagaatttttttcccaaactaaaaatttatgctgcctctcctctctctcacgtttttatttttgattttggttactgatttatttacactagatatatatgattgagtttacgtggttattaggttagttataatttaaattaagacaaaaagtacattagtatttcctgattccaggacacacttacaagtataggaaagttggcctattcaaatcatgcccccaccccccaccaataaaataaataaaaatgaaccgggagtgccttggtaatcccttgcccactaaatcaagtgggtcaggcgcgataggctttgctgcgtacaacccacccaagcctacttaacagtttggcttccacgagcaagatcggggccttatacacaaaatattactttgataaataatataaaatatgtaataagatattaatcaattacaatatgaaacaaaataataaaacaatacttccaaaattgaatcagattaaatgaaaatgcagagattttctagaagtggcaatggtgatacaaaatatccaatatactataattttataaattatatttttcagtataacaatagaatattaagaaaaataatctttttaaatctaggagtaccatggtgatacaaaatatccaatgtactataattttataaattataattttttagtataacaatggaattggaaaaaaacaactagacagggcaatattcacagaccagcaggccgatccgggtattgggccgggcaagggaatgcaactcgtaatacatgcccgttctgttattaaatgaactatttttttggggaccaaccttttctggggaccattgttttattttgggtaacccataaaaagtaaatctaggtcaccccttatctaaacatttatattaataccaaaattatcctcttgattaattttgtgtaatgatttgttagttttaataataattaatgtacttaaattcggttaattattgattagtgtaagataaaatcattaatttttcttaaaattaagttattgaaagggaagaagaaggagattataagagttggaaaaactccattattttttttttattttttgaatacgaaccttcaaaccactcaagcatacttcaactttagttttttgttgcttgaattggccaaagtttcctgaaaataagaaattttaaagcttgaattgggttaagtcaaacaaattcagataaagatctgaagaacaggtagtcgaacttattcggaagcgtagtttcagatactttttcctaagacgcatgtgtttgagggtgaaaacgatttctgctgattttggtaatttcgggtgtgtgggtgagaaacgagtttaaaccctaaacaatgtactgcaagggagtactttagattcgagagatcaatctgtacaaatccggcctaaaccaagaaatggtcgttccaaacttgcttaggtcacaaagtgaaggagaaggtttgattttggggagggaagcgaagagagtgttgagaccagaatagttgattctggaagagtagttgttttacgacttgtatcataaagttggaagctaacagatggaaagctagcaaatattttctgagtgttgtatgctcctgacctgaacttgttgttcggtggaaattggtaagacctgtttatacaagtcgaagttaaacgtactctggtctcattaagaaatggaaagcgggtgagtaatgtgtgggtaaaatacccgacggccacgtgtcgacatcccaagggatgaatacatgataagatgaggaggtgggagcaccaaatcattcgttgatagagaagtatttgtctcagtcgaggcaactgcacaagcgccacatgaatgacgcgtgtatgtaaaggtctaatcttcttagacggtcaagtctaaaaacaaagaccgcatttaatgaaggataagaacatgacttgggtagttgggaatcgtgacggaatactcggacgatctatactacgacccagaggcgattgagcacgaggttatccacaaaagggcaacacgatccaagggagagaaagacaactcggagggaggaccaagtatgtcatcacgagggacgatatagaacgagtccgagggaaccaggacgacggatgacagctcacccatctcggacgatcaagtgactacgagtttattctgtctataaataccagtccatgtaccaggaggtggacaacttatgtaatcttagatggtttttctacaacgaattcctgagaaagacttaaatagagagaaagtgatgaatctagaagagatctgtaacactttcaagggtaagaccttataatcaataagaaaacatcttcttctccgtagacgtaggtcttcatggcctaaccacattatatgtttgtgttaatctttacatttcatgctattcacatctttttcatgatgaatcttgtatgtttaagtagtttttagtctttaatcttacttgggtatagtagtcagaaaatatgcagctacattttggcgctagaaaatgggaggtatgaagatctaatctacctccctaacaacaactctatattgttttcataatctctgtaagagatgtgttttcacactacaaagtagatttctgttgagatgaatgggtagatctcggactcaaaaatgatctccacgatctaagaattctaggagaacctcaagatcaacagatctacgttttttcactaattttatttaagatttcttgttcaagattttcaaagtcttcctcaagtagctcaggagagttgtagatcggagtaaatattaagttttaaacacttcggtgctcaaacgatctcctccatgaaatagctggaaagagatgctagtcagtagactacataaggaaacaatcaccttatgagagttcaaaaagaaaaactattcttgatgttcatcatcaaactctccataatctcggaatctccttcttaagaatttgaatttaagtcaaggggagaaattaatgagtatataatcagtcatcaaactcaaaattttgtttgatgtcataagttaaaagatgatgagatatatttcctagaacgggaaaacgtactcaatcgtcataattagatttcttccctataggggtatggcgtggtgaaggagatatttcctcgaaaagaggggactggaaaaataacttttctccatcatcaacacctcatgcaaacatggatgttttgacattttcacatgtctccaaaatctactacaaagtattcctttactaaactgtccagtcggaactatgacttagtaattgcatgtgaactgcaaatatatggtcccacttttctaaaagaaaagacaaattaagtattattgcatatgttgcagggaaggtaatggtgacgcgaagatatactcgtgcgagccaaggagaaaatggtggagcccaaacataaggactcgacgatatggagccaggcgagcatttgatcccaggcgagggacaacccgatgaccaatatcgggaaggactaactgataattctagctccgaaggcgaggaaaaccctttcgagaagcgtgacgatattcgtctcactcaaccaggagggttgagcttcttgccgagacaaacaacaaatagtgaggtcaaaaaggacaacccttcagacgtcgtcgatgctaatgctgcagttgcagccatcctgagagcccaagaggctcaggataagagaatgatgaacttataaaggcgcaataggaagctagaaaggagaaaccgcaggataaaacgcaaagtaacaaagaaagtaccactcaccaccattgaagaaatcccggaggaggaaaaccctttcgagcatatgcaagacgacgaacgaattaacatccctgacacctcgaacgaggaaagataggatcgatttcctaagggaagtagaggtgtgtctgaccacgagggtagcctatccgaagggtcatcatatgttgatcccaaacacaaacgaaacaagaaccgaatcgacgaagtaaatattgaatacgataccgagaatctcgcagccacaaacccaaagcgaggggagaactcgaggtcatctctctctaggattgtgtcatacgttgaacaatcagacgaggactcatggcgatcaaggcatctcccccatgaaccatctttctcgcacgagagagctctaggaaggagaaagaaggtcgaaaccagacgagatgaggacgaactccaagtccgagtcaacctacttaagacaatgtattgtagttgcatgaaatacgacactacacccctcatatgatttcattattactcttaattttattgattaatctttgaatgttcttacaagaaaagataaaagaatcaagaatgacctctgttctagactttctctctcctatttacttgtttcttactcaaaaagatctctctctttcctttacaactgaacgactatttatagggaagtacatagtggatgacagctaatctgtcctttattttcgaatatggcttgcgacaatcttgaaaccttataaatgttaatctcgcaaactctttaattttcgcaggaccatcacatctttctcatgattttagctgacgtcgtttattatatcatttatgaaattgttttgcgatgctgttgtgttgtgttgttgataatttcgctaagatatcactgttgtgagattctgatcctacatctgaaatttttctgcgacgcccaccaccgctgattaccaccaccaccacttccgattatcaccaccaccaaccaccgattaccaccaccacctcctcccatcaccaccgccaccgcctatttaaggaatgtaacaacatcaatgcaatcacaattaagttcggttacataataattttatcgagtataaaagacgccaaccgcaacctgattctgccatgggaccactccggaggtattttccaacaaacccttcactttaatttgattttgattgcttcaatcgaataaaaatcatcaaaatagggttttaataggagttacacagccatgttcggttaggccgatttttcaaaaaaccctagtttactaaccgaactttttgaaatgaagaacacgaagaacagttcagttctattggatttaaaactaagtcgccgaactctctgttcggttttttcgcaaaatattttaaaactgcaaagtaaccgaactccacccttagaaccgacaaaaaacaaatccagtctaaccgaactgtgttgttgtgtccactatgttgagttccaaaataaccgaacttagccaatagagttcggtttattcgcaaaaacttttaaaactacaaagtaaccgaacttagctaatagacgctggaacttcacagtttttgtttgttaagttcggtaacttcaaaattttatcgcagaaaccgaactcagagttcgtttggttagctgttaggttcaagtttgcgaaagaaccgaactttgtaaacttatatactcttatattacgtaaagttcggttagatcaaaagtgcatgcagtttgcgagttcacaattgtacactaaagttcgattagttgagaaccaaccaaacataacgctgtaactcctagaaattctattatttgagagttcggtaacctgcgtgtttggaacaagtaaccgagctacactttcagatgagttcggttacttgttcatctcacggggcaaccgaactacaacttcagatgagttcagttacttgttcttcatataaagtaaccaaactgttcaaaatccagttcaaatccggatcattttgaagattaacaaatattctaggagaggatggagatgaagaatcagatgagttttcatcatttgaatactcaaacttagtgaattggaaaaaaaaattatttttcatgtttttctccttcatcttctctaactctactctctcaataattctactcaactaataataaacccatcttttaatttaatctcactaactgtttttaactaaacattcattaatcataacctaaaattaattaagaggatagattaagtattaaataaataactagatatgggatgacctaaaattacttctaatgtctttacccaaaataaaatcatggtccccaaaaaaatcatggtccccaaaaaatcgttcttactttagcagaacggaatttgttagtgggcttttgggcttgttaagctgttctttctggccgaagttggcaatggcctgtggaaatgatgtacctaatagagattgttgcatccaaatgttgtgcaactagttgtaatgtgcaaatactgcccggctaaaaatcctgctatcttgtatataagcttaaatgacctgaatacatagtactgtaatgcaaatacaaaaatcctaaatatttgttgtgcttgaatgcatcatgccatcagcagaacagatgatgatgtgtcagcgatagaaacaattccgggccttaaacattcgtgatgtgtgatcttgttagtagtgacaggctaggtgattgtgtttggtgtttttaacatcagtagtgaaactcaaactttgatagactatgtaaacctacttatttatattggaactagtgccttttccacattctacgaggctatagcaagatgttcataaggttcggaagagtttgagtttggttactgttttttcattcttattaggagaatataattactgttttttcgtctctaattgaaaatgttcatttgatactgagaaatgacaagctaagatattaagatatagcaagtcttggattgggaataattttccttagagaataatattttctgggaaacatatttatataaaatcaataaatatctctttagaatatcagagttgagtcggaaataattctccttattctaaatattacaagagttaagtcggagataattctccttattctaaataaggtaaacaggataatatccattatattatacccccttagtctgagcgggagaggagcaaacgctaagactagaccgaaaacaaacaaatagctgacgaggtagtcccttggtgaagatgtcagcatactggttttcagaggggacgtgtagaacttgaatgttaccaatacgaacgcgttcacgtacaaagtgtatatcaatttccacatgcttgttgcgctgatgttgaacagggtctccagacatataaatcgcactcacattatcacaatatacaatagtagcacgtcgtagaggaatatgaagatttagaaggaggttgcgaagccatgtagtttcagcaacaacatttgctacccccagtattcagcttcagcactggatcgagaaactgttgcctgacgtttggatgaccgggagatgaggttgtcaccaagaaagatgcagtaacccgaagtcgatcgacgagagtcagagcatcccgcccagtcagcatcaaagtatgtcgttaatcaagaagtagtggagaccgagataaataaaccgtgatgaattgttgcctgaagatggcgaatgattctcttaagagcctgcatgtgaggatctcgtggatcgtgcaagaataaacatacctgttgaactgcatattaaatatctggccgggtgaaggtgaggtactgtaatgctccagccatacttctgtatagagtaggatccttaatcgcaggacctgaagtagcactgagcttggagttggtgtcgaccgaagtagccactgggttacattgtgtcatggaggcacgagtaatgatgtcctgagcgtataatgacagagacaaatataaccctgaagatgatcgagtgacagaaataccagaaaatgatgtagcggtccaagatcagacatggaaaattcccgtttcattagatcaatgaagcggtgtaggagagtattgttagaggcagtcaaaacaatatcatcggagccggattgataaacaaagatagatgggtcacacacactaccacgaaaaccaaaattagtaataaactaggaaaacctctgaaaccacgcccgtggagcctccttgagaccatatagggatctgtgtagtcgacatacataatcaggtgagcagaatcaacaaatcccggaggctgatgcatgtaaactgtctcagtcaggtcaccatgtgatagacacatttatgtgtctaatatagctcatttgtatatattgttagtactcgatattgtacttatttggttattttatgtatttgtaggtgtttttggaaaataatctcttgcggcgaatttggctaaaaatgtggcatttggacctccgttgataacgtaccggaagagcctcagaagtgtaccggaagtatcccagaaatacccaggaggaaccccgaaaaaagtgcggaaaatgccccagaggacacttgctatacggacccttgattttggataaggggtaacctaattactaaggggtgacccatttccaggcagctgctaaagggacaccagaactggatagggggagatcacatttcttcacgttttcaaattaatgttttggcgggaaacttcatgcatgtttactggcagagttggattcgattaatggacggtttctaaagagattcaacccctaaaatcagttgggctggatgtgaatggactaaacagagatggtacatgtgttttgatcgatcagattgggctggaatagccgggagaagaaatcagagtccaaataggacacgtatggttctgtttacgtttcaaagattttttgaggagattctgggagagttttacgctaaagaaaactctacttggtcatgttaaagtcttgggagagttttggggcaatagaatagctcataaacgcgtacagggagatcagagagagatattctctcaacagcgcagagaagaaaaaagaaaaaaaaaagtcggattcagtagagatttttggggattaaaagactatataagagttggttcaagtcatagaagggttagaaacctttaggagagagtttagattcgatgagagcctaggagaagcaattatagaggagacaacgctgctgctgctgctgccattaaagcttctgaagaacacgaagaacagactcgcagagtccgtcgttcttcagcagacttattttcgtaccactgttgttgtttcacagcagtagatagttatcgtttacagcagtcttaaattaccatacccctttgtaacagtggcgctgtaacaccattacagcgtcgcaaatttctgtttcatctcatattcatcaataaaaacacctattttatccatgaattcatcttgtgagtgtgtctttgggatgaggagctaaacccattagccgagacgacggaggaagccattggtccatattgattggtataattctaatgttattatttatttgcaatattattatttgattatttgcatggaattgaatttaaaatattagtttttattgaatagttgtgaattattttgatgaagcatgctgggttttaaaaacttttgatgttttatacgttgtgattacaattatttcttcaaaaatatatttgaggcaaatattagaattatttttaaagatagaattgcatgaatattatttagaatttactatttaattggttaatggtggaatcctagtcttggtattttcactaaaggtttgaactattttatttatttgcctgtttaattaaaatctagaaaaattgttttcttcacaagtctgaaaagaccctgtttttaccactactacaatcactatttgaaaaccatcaccatggagaaaagcattcttaacatctagttggtgaattggccaagaacgcgaagtagaaatagtaagaatagtacgaatagtagcaggttttacaaccggactaaacgtttcaaaacaatcaaccccaacctgctgagatttaccattagcaataagacatgccttgtgtcgctgtagagaaccatcagaattatatttgtgacgaaatagcctcatggaacgaataacatgagcatcacgtggtcttggtacaagttcccacgtattagttttcaacatagcattatactcatctttcatggcggcattccaatttatatcctcaagagcatataggtgagatctaggaaatggggagacatgttgtacagtttggacatgaagattaagacggtggattggtttataaataccgcgggaagatcgagtcacaggtcgtgaatgagcaggtggagaggcagttgagggtggagattttgtagtgggtgtaggggtagtagtgggtggaggggaaggtggtgagcaggtaggatggactgaagtggatggggtaggttctgcacctgttgaaacagggtagtgatgaacaggcgtcagacctggggagttgggtggatggagaacagtagtggggaagctgaacatacacataggattgaaagcaggagggaagttgtaccgacgtggaagatgagttcggactgacgtggaggctagatgggattgacacagagaagacgttttggaacgaggagttgaagattgtagcactgacgtggaggaaaggttgttggactgacgtggaggaaaggtgagactggagactctgagtagtagtaggagttgggtcagaccgacgatgaggatgagtatatatgccagggaaggtgacactgtgtagggtgacagtaggggcagtctgagaagaagggtatgagagatcataagatggatgaataagataagggggagacttgatattacaaggagcatttgtagggagatttgtgaagcggaagacattttcatcaaaggttacatgacgagaaataataatcttgtttgtggctagatcaaggcagcggtatccatggtggttgggaggaaaaccaaggaagacacatttagtggagcgggaggcaagtttgtgaggagttgtggaggagagattagggtagtaaagacaaccaaaagtacgaagatggtcatatgttagttggcgttgatagagaataaacacgggaaaggaaaaatttaggatttttgtgggaagaatattatgaagataaacagccataagtagagaatagacccaaaattttggtggaacggaagcatgggacataagggtgcaggtgatatcattgacacggcgtatcatgcgttccaccttgccattttgagaggaagtttgggggaaagagaagcgaaaaactagaccatttttacgagaaaaattgtgaaaagaagagttgtaaaattcacgtctcatgttgcattgaaaacttttaatttgacgctcaaattgggtttgaacaagagaatgaaattccaaaaacttgtcatagacttgggatttaaattttaaaggataaacccaaagatagttagtgaaatcatccagtaagataagataatagcgaaaaccggtatcaacatgtaatggagagatccataaatcactgtgaatgctatcaaatggagcaaaattattggaaattgattcataaaaaggtaatcgaacatgtttactaacttgatatgaatgacaaagtttagaatgttgattcttattacaatgaatataattattggtacgaaaaacatcttaaaaaaacttgccgggatgaccaagacgactatgccaaatatctagcgaacaaaagcaagagatatgggcgaagactgggatgatttttgagctggcatggcagaggtggtgatagggtagagctccctggaactattgcaccgaaggataatcttcctcgaactcagatttttcacagaaaaaccagacagatcaaactcaacagacacacgattatcagtggtgaacttacgaacggaaactaagtttttgataatatcgggaacaacaagagtatttttgagttgaagagtgcgagaagggagatttatgagctttgtaccactagcagtaactggaatgttattgccatttccaactaagatagaccgtacagtactaggatttgaaacgttatgtaaagtacctgaataagaagtgagatgcgaggtaacaccagtatccatatacaaagcatcatcgggttgctatagatgcgtagaactatatgcctcagcaatatctgtgagcttcagtggttctgtcgccattgattttaatggtttagagaaaataggatcgtagagggatgataccatcttggattggggataatttcccttagagaataatgttctctaggaaacatatttctatcaaatcagtaaatatgtctagagaataccagagttgagtcgaagataattctccttattctaaatattacaagagttaagtcagagataattctccttattctaaataaggtaaacagggtaatatctattctattaacaagattagtggcagacagatggtagtcaagatgctgatacatccgtcagcagtaatggaacaagaagaaatggtggttccttatttctgaataggaaattcgtgacagaattttgaagccaattcgtttgtgacacgtgtctaacagatggccactcggatgacacatggccactttggtacacgtatattacccagccagaatcgagtccatatgcaaactcaacgagttaaactgcaactcggcaagttggatgatttgaaaggcttaaaagtatttttaccttacattaacggtgccaaaaaggttcaccggtagtcgttttctcaataaaacggtcaaaaccggcctaaatttgaaaagttcaaagaaacaggcctatgattgtaaccctaataaaaaagcaggcctgtatgtgtttttcacccatagaataattctcttgaaagatcgttcttagacttgagtttggtaagatcgttcgactcgatgggttagaaatatacagtatccttacctgaaatcagtcgtagaacctagcattataatttttcctgagcctcgcaagcttaatcatcatacgctttaggccatgaacctctgttgccaccggcaccaaaatactctccgcaatctctatagctagtcctagttgtatcaatgactgcccaagtccctaaaatctgctacagcccttccgaatggcgccttcttggtacaggattgtaacaccttctggggaggtatcgtcatgtttgttagagtggtgtgcgccgtcttcaattacatctattatacaaaatctgctgcatcagtagaatccgaaaccgtggggttaagaacagagcggcaaacaggacaagtagaataagaatctaaccaagcatcaacacattcacgatgaaaaatatgactgatacttaggtaataatcacatcaaatcttcatgttcatattcacctaagcaaacatcacaatctagtaacgttcctactgcactaattttcttatgattcttaatatcagagtagactaatagcggaaacgtcgactggatcactattgaatcaagacctttttctgtagttgaactatcgtcaacttagttcatactggaaacataatagactccatccaaaaaaaaaaaaaaaacataatagacaaacataaaaagagtgaatacctaagaagaacaacacgcagaatcatctttaagaattgcatacttctaatctttttttcgctctcccctctctcctctcaacggttacttttcttcatcttctcaattttctccaccctacataaattttcagatccttgctaatgaagcgtgagtagtaatcctgcttgtgtcttctctgagctagaagagacaatattatgggaggggaatgataggtaactaagagccggactcgatatttagcctaaacaacattgaacggatttattttttctttcattattgggatgagtcattgtacgaacattcatgcattttatctctttcttgaaagcatctcatgcattacattctattctaggcatcttctcttgcaccttgctttaatcttagtataggtttactctggagttacgccggaaacctctctgccgatgtatctctaggagaattttgttagaattttaatcgcttctctcttttagtttaaccattcttgtgggatagcaatcctctaacaatccattatgatttccatagctccttcctttaaagcttcatttgattaattgagagctcccaatttctcgatctaaaagctttagaaattattatagttaaaacacatggacatagtaacggaattgctagtcccagttgataatgcttcatccagtgattactattggaatattagagtttgtcacacacaaatagccgaggttaaagtccagtgaaggtccgaggcaacacaagcaatcaagacacgtactggaaaagaggataaaaccaatctaactaccgtggacttaatcaagaagtggacttaatcaagataagtgaagagaagcttccaagatatgctgtaatccaagttgttatctagatatgcttcttatcgtgtaattagtcaacaacacttatagtttaccactctataaatacgagtgttctaatgtaacagagattatcccagaatgatcaaacatctggagatcaataataattctcccttcggggatttttccgtggacgtaggcgttagtgccgaaccacgttaagatcttgtgttcttattatatgtaatttgtttctctgatcgatctatgaaccctcgatacccataatttattatgggatcagagcggggagatccgctcgatttgcttccgctactaaatttttgatttgtcattcaataattttcttcatgttcagtaattatcctgcttacttattgaactgcatttttttatcaacacagtactgcttactcattgcggactatactgtatgaaattcaattggaacaaagttaaaagcatctttatttatttctgctcttcactgcaggatcatttttctaccatcatcgttccttaacactaacatgattttctttgcaatgtcaaggaatcattgatcaacactatacggggagtatcttcaatcttctcttcgtcattatacaacaattatctttgttatattttctgtcaaaataatttgttgttctcaagatcattgtcaaactgattattttcaaatcagtcctttctctactacccatatttcttaaggtagtatcttgaataacagggaaattcagcaaatttagtttcctcattgctattttactgattcaatcagagacacgttgtggatgatcaattatacattcactaaaaaaaaaaaaaaaaaaaaaattcccttctttgccaagaagaattcaatcccgaaaatatctccattttcgaaattcttgccataatctgggcaattgatttacttttggaaacgaatttcatattttccatctttatcgagataatcttttatttctgaatattttcagatttggtaacatcttgttctaatactttaatgtgtttttatttctgaaaaacataagtttggtactgtgaaattcacacagctaatacgttacgttgacaacgattcttgttaacaaaacggtctttcttcctatgtttgggaatgctatacacagtggatttcttttcctcccaccaatctcaaatatagtcggatatcattaattcttgatttttgtttctctttatcaatgaaacgatcgtgttccaactcattaaggcatcatattcttcgggtttttctgcgactgtcgcagcttagataaaaccatgagcacgcctttcaatatctcatcacataatcagttaaccttattttctatggttttgtgttttcagatattcataccttgttaagtcttaacagatgtatgggtattcaagtcccgtttgcatgattgcatcacaacccttgtcgttaacaagaaatgacaatattccgttttatggatatcaatttctagtgtttcaacacttctgccaatattcactctgccgactactggatggattaataatcatcaaacgaagaactcagctaagtctttttaagcccgttacgcaatgaagactacatgatgctgttgagaaaagttattttgctgcggctgcgaaggttattttgctgctcaaatcgctcaaatcgcttccgctttctaaaatttgttttagtatttcttttcatcagtaccatcttgtgatggtgaatagtagtctcttttttcctattgatgaatcttagctcagtttatcagagttatcaattaactttttccgattatattggaaaatctctgtggatattttcttcgcgtcaaagacctgcttcatattacagtcatcagttggacgaagaattcgtgaagcagaactctatctaaagtctgttaaggattcatctagcgtgattcttccattctatagagaagtgaattttccttcaaagcatggatggaaggtatgacaaaatttcctttgttagtgtcagtacgttcattggccctttcatttaatcaaacaacttgattttagtcagtattattcaattgtttcacatccagaacaactagttgatttaactaattttgttttgtgatacttccatcatctattggctctctaaattatgatccaatcatttccgccgaagatgctttctatcttttggaatctcatgtcgattcatgtcacgttttgctctaatgagctacttatctttgatgataatctactttctcaattgcatttaactgctatctttgttacgggtcatcttggaccttattttgtttcctgctcttgaccaatatctcgagggtttattcaatctcaacccattcatcatgggtcttcctcaaaatatttttgaattgaggaaaagtctgtttggtgatcaaatataccttctttcaggtctttatccaagatcttattattcaaatcttgctctgattttatgagctaatattcctcaatgtttagttgatcatcatcctgtcaacacaatccattcacaatgggtttttttaaacacaatccattcacaatccatatgttggggatttatttatacaacacaattcacaatgggtttcctgaaaatcttttcgaaactagttttgattcacgaaaaactcttttgacgtccatctgtgttcctcaactggacgtatcttatactagttgtaactagttcattataccttgttcattcaacattatcatttgaacaatcaaattaattttattagtttgagcaactaataattaatgtcctacataaagtatttctttccttctctcaagtcggtggttttccatctctaaccattttggtttctccttagggtttgtgtgattcccggctatggatacacccacagacttaataatgataagattgtgatcatattcaacacaagtctctccctgaggaataggatatgcaaaataaaacggatgattggtaatcgattatgcgatataaatatgatttcaccaagtttcactggtcgattctctccttttagatatttatgcaagatcaccctagctcctaagtttatgagttaattcataaatgtagtagttcaactgctcatttatcatctaccattctggtacacgatttgtggaagaatttgaatttaccatatttctcatcatccgatctcaagtgctgttacatgggtcatttcaagtccaagttcaagttccatggctaataatcatcgaaggttcatggatacagagttctgttcaacaattttcaagttgcacacttcaaaacattacgtgtccaacttgagggggggtattggaatattagagtttgtcacacacaaatagccgaggttaaagtccagtgaaggtccgaggcaacacaagcaatcaagacacgtactggaaaagaggataaaaccaatctaactaccgtggacttaatcaagaagtggacttaatcaagataagtgaagagaagcttccaagatatgctgtaatccaagttgttatctagatatgcttcttatcgtgtaattagtcaacaacacttatagtttaccactctataaatacgagtgttctaatgtaacagagattatcccagaatgatcaaacatctggagatcaataataattctcccttcggggatttgtccgtggacgtaggcgttagtgccgaaccacgttaagatcttgtgttcttattatatgtaatttgtttctctgatcgatctatgaaccctcgatacccataatttattaattacatgggatttaatcttaaaaaaaaaagactaataaagatataagacacaatagaaaaacaagaacacttaatacccattctttttcttctcgaaatgtcaacttccttgaggtttagttttgcttgaatcagatgactatttatcctcgtgcttctgcggcctcagcggctgcaaaatttcctttgcctttgttccagttgtatcttgcttccatcctttacacataggtgtactcaaatcctggaagcatctcgcttaccaatatagttgaagaaattggtaaacctagggacatctgcctctcagcttcttctcttactttttcctccaaacttaacttaacagttggactgagattacaatatgttaaatactttgcctgctctgcatgacgaaacaagttagttgcacagaaataacaaaaatagtactgaatcctatggagatgatcatctctacatcgcataactcttgtcattgatatgggagtatcctcaggaatggtttcatgatcacaagccattaaaagactttctggagattagaggatgttttagacatagtgaatatctaaggtttctcagtgttataatgcttctaggttctccttttataagtattttcaagttgctaggttcgttgaatttaattctccctgtgaatgcttgctctcatcctcatttcttggacttatcgacatttattgtcttctcaaagatttatttttccctctgtattgcgaattcctagtctcattttttatctaccctgctccatcaatattatttttctgcattttcatgaatgcgaatgactagtaatattctttacttctataggctttttcaacttatctagattagtcctaggttactagggttaatcgtgttgaacaatataaacttctgccatcgctacgatatgtccgagaatttaagctctcttatccttaggattatctcgagtatccgggttttctagtatcttaggatgataggttatttcataggcgacgacttttgttctattgctttctgctagtatactacctctagatgggatgagtataaaatgcttagtttcttgaaaacttttttctgagcattaagtttcaaatttttctttgaggtgtcatattcatattgacattttttttcggtggcttatcttggtgtaatggaatagatagacattatacaactatgtagaggatagacttaaggttttgaagttcaggcctagttaattaattgagatctcagctacaatattcaaagagtggatattttaaaactaaaatattttgttaactttcccttttatctaggactatacctcgtactggttcttaatttaaaaaataagtcctaggataagttgtcgtcggttaactgaccattttaaaattttatttttccttggtttttgtttcgatcacgggatcacattgggtagacgcatatttggtgatctcggctcatataaaagttatgcccttctttcattcttccttcattctcaaagtttagtcagttgctttctcttttatgatgaatgcaaaccatgatctctataaacaccttagtggtctctctttggcgtagagaatggccaaccacatcaatattggtctgctccccactcctcctactttcattagagattttggcattaaacaatatagcattctggctagggttttttctatagttattctaccataatgggaagtaaggaaagctcttaagagcttctggggaagccaaatttctttccaaataagggaaatagatccaaacttatttattatcacctttagaaataaagaagatttccactggataaccgaaaatggtccttggtaccctttcggtaatgttttagctgcaacaacggcttaccaaggaatgaaaatatcaactgacatggtcaaagagattcctatttgggcttccatcttaaatataaatttcgaacatagagcagaagaaatgctaggcttaattgcgagtaaagtaggtcaagtagctagagtttgtactggaagcgcttctccagattctattccgaaagtacagttgtgggttaatattgagaaaccacttgtccatcatttgcttgttaaggtaggaatatacccggttacttccatttatttcattttcttaaccttccttataaattttgctcccattgtctgagattgggacacaaggttgaagattgtgttgtaaaattaagcagatgtttagaagatatttatcatatatttgttaactccccttacccaagtgacgacatgaactggctgaatgatgtcttggttcaagtttggaaccccaaatataacttcgatcatactggtgtacctgttcaagtacaagactacctcagccaaactggtgttagagaatcttttcacgatatctttagaacttatgttgatgaagaaccggcgttgcgagatgatgcccttgaaacttgcatagtatccatttttctcatcccccgcatgttaaccctagtagcacttatgatgttcttggtccttttatcattactgaatactcttcttcggatgaagatatgcccctagtatcttcttcggtcttgggaaagagaatcttcccgtttaatatccctaagaattttataccgattccttcgtaggattaatcattcctatcttctaactcggaatcattccgagtcttaaccgaaatggaatctggtgcgatggctaatcttgatgatggaatagaaccagaagagttggttacggttcagaaccatttaacacctttagagtcttttgccgacaagtcaattgctagaaggttatctttttcttcacctgttttgggggaatctattaaatacctaatttctccatcagtgcatgtaaacaacgatggatatttctcaaattgcattcatctttcatctagcaaatcatcctcattgcacagtccattgactctgccaagatcagcatttaaaatttcagtgcctgatttcatctcttcttcttcatcggagcatttatgttatattccttctttcgatggcaagattgttgaaattaatcagtacggttctaacatggataatcatcgatcaagctcaagtacttatcaaccaattccattcccagatttagtcccttcacagcaaaacgaggagacacaggtatttcaaactgaaccctttaatttaggttgcttagaagtgcttcttgttaatttatctttccattgttcttgtgatccatgcttgcctgttctctctttagtttttttcaatttagtactgctaaatagtgaatttcacttttcaacatccttagcagagaacttagatataacaatgaaaataatagcctggaatgtgcagggatgtggaaaccccttcacaaaaaaccctcttaaacaaattatagatatagatacacctgaaattctctttttgtcagaaaccaaatctcaaagacacttagttaaatctcttttgaaaaattaccctaatattcagattgtagacccaattgggaaagcaggaggtttagcactagcatgggtagatggttttgcttttgaaatagtgcaatggaatacaaacatgattaatatcttagttcagacaaatcacgagtctaagaaatggcttttaacttgcttctacggcagtccatatcctcataatagacacaaagcttgggatttcttatcagaaatagctgaacatgttgaaagagaatccacaccttggatcctactaggggacttaaacatgatttttagtcaagaagacaaaattggaggactactcttctgtttatgtgtgaaaatcgtttctgccgattttggtaatttcggtaggtgagtgagaaacaaatctaaaccctaaacaaatgtacttcacgagagtactttagattcgagagatcaatctgtacaactccgtcctaaaccaataaatggccgttacggatttgcttcggtcacaaagaggaggagaagggatggtttagggagggaagcgaagagagtgttgagaccataatagttatgaaagagtagtactcgacttgtatcataagatgaaagattgagaagctagcaagagttgaaagctttgagaaagctagcaaagttgcctttctgagtattgtatttctccatgaccaaaaacttgtgtcttggtggaaataggtaagacctatttatacaagtcgaattgaaacgtactctagtctcatcaaggaaggaaataaaggatgagtaaatgggaggagttggtaaccgttaacgcatggaattgatgttccgtaaaagaaaagtgtttcaccattatttccctatttacttaaccgcttcatccttattacactttcttattgcgggcgtagtgtacgatgcacgctgtaaaccgccaaaccaaaaccctaaagagcatcccccagcttgagacatgtattgatgtctcgagtgttttcgtggaaaacgtgtagcatgtcgctggtgtttgataagtttccaggttgcaagtgttgtgtagtatgtgccagtgacatgtgtggcatgccttagtcgcaggttccacatcggttgcaagtggcaatgccaagttgcaaatgttgtgtgacatgtgccaacggcgtgtgtgacggcttggccctaggtttgcacggcatggcatgctaggttttcaagctccactttgacatgtgccaatggcatgtgtggaggcttggccctaggtttgcacgacatggcatgccaggtttgcaaacgccactttggcatgtgccaatgacatgtgtggcggcttggccctaggtttgcacggcatggcatgctaggtttgcaagcgccactttgacatgtgccaatggcatgtgtgggggcttggccataggtttgcacggcatggaatgctaggtttgcaagcgccactttggcatgtgtggcggtttggccctaggtttgcacgacatggcatgctaggttgcaagcgccactttggcatgtgccaatggtatgtgcggcggcttggccctaggtttgcacgacatgacatgctaggtttgcaagcgccactttggcatgtgccaatgacatgtgtggcggattggccctaggtttacacggcatggcatgctaggtttgcaagcgccactttggcatgtgccaatggcatgtgtggcggcttgaccctaggcttgcacagtgtggcatgctaggtttgcaagcgccactttggcatggttggcaggtgtgcaatgatcatgcggcttggttttagcatggttgccatggtgcgcaacagttgtgcggcttggttttggcatggtttccatggtgtgcaacggttgtgcggcttgcattgacttagggttttgcgcgtcgaaaccctaatttagcatttttgaaaaaagataccctggtaatttttacataagtacattgaatgctctaataaatgtgtttggtgtcaccggtgacgtcatgctatgcataaggttttacgattttaccaccagaaagttcaggatgacatcaaccatattataataaaagacaaggaagtggaaggatagtatgggaacaaataaagttgccaaagttgaatactacagtagataaagtgtcagaagttgtcatcctaatgtaataaatcccagaaccacatatttttgtatatcatcgttttcatggacacacaacaagtaattgcagaaatgtgaggaaaatcatattgaggatgattgaacaaggaaaattggatcatttcttagcacagcaaccaaagaatttaccaccaccaccgtcggaggaaatgtatatgcaaaggagaaatgaaagaatacatttgtaattgaagtaggtgcgaaagcgcagaatctatattttaactcaattgtacattcattcaggaacatcgaagactttcatgacaatgtcttaagtagggtgtatgcgagagatgctgatggaagataaattctcaatcttgcgaaagtgtcaccattgaaagattggaaaaaacagacaatctcatttagtgcggaagaaacaccaggaggaggggtatcgcatgaatgtccattagtagtgagattaggaattaatccgaagccaaaagcatatgatgatgaagaggatgaagcaaacacttgaggaataaatagaatcttaatagatcccggaagttctgttgacattctattttatcctacatacaaaaccatgagtggcagagacgatgaattgattatgtcaacatataaaatttatggctttaatggaattgcgaacaaaccaaaaggtgaagtgactatgaggattcttcttcaaaatatgtcaacagaaattgtattctgtgttgtagatgttgaatcgccctatatcgctctaaatggaagaccatggatacatattatcttgggcgtggcctcaacatttcatcagtgcataaagtttcctttaccccaaggtgttggtattataagaggagatacaattgaaagtagaaattgtcaagaaattgacatagacaagtgtgaagaaagagagagtaagtgaagaaattggaaaaagcatgttgcagaaagtcaaagagctgagaggttaatggtggacgcaatatataatattggacaaaaagatgagcacaatgctgaagcaggattttacatggataatgatactaagagaaccagaaatactatttctaaagaagcagaaagaatacagaggcaaaaattgtgttttcaagacagcaaagaagtgtgcgatggtcatcgcacagaggaggctgaaagggttatgagaaataatattctgaaaagtatctgcgagcttaaggagatacaaaaactgaaggggataaatgaataatacgaggaatagatatgtctaagctttgggtagtgtgaattttatccgacatcatcaactctacttaaccctctactaatgatccttgcaaactttgtatttgctatactataagcaaactttggcgtgaattgtataaattcaaaaaattgaaaatggaatgatgaattttattttcctaaagtgataccatatcaagaacagaaaaattagaatctttataataagaccttaataaaaggcaatggaagtgataatctttatccagatagactaggaatccagatatggcgtgcaacctagtttgcatacatgcaagaggcaaaaaagtaagacctatttcatgtcatagtcggataaacctataaagcatgactcaatggaaagcaacaccgaccctggaacttgagttatggagattttggatgagaacaaacgaaaatgcccatccgggagaggtaccttaaattttcagtctaagatagtaatcttatattgagagactaaggtgagaaagtctctcataaggagtgtagaaactcgatcagggcgccgaggtacacggttgagtcaagagtgcccgcgacgtctggagcgtacctttccactcttgacaagtcctgactatgatgcactcggtccgaagataccccacttagggtgtagtctcgcaaccataaacctcatcggtgttgggatgtgagactgcgaaatcaactgatttctgaattaaccagacgggaagagccataaccttaacccggtagaggtaagcttccttgaaggggcaatcagggggaagataaggacgccaccttccattagggagctgaattatgtcaaaagacgtaaatttaatgacactttttgctcaaaggagtattaagacttatcatatttatgcgaaaaacctaaataggaaataatacaagaaaaagataagatgagatcaatgggtcgatacactataatgtaaagacagcctgcgatctcattgcacagaattgaggcaagataagacctttgcataggaaggcaaaataataccttgtgagaaatataaaattttacaccaaataaatttacagggaaaaataatactgcgaaagtattcgcaccaaataaatgaagaacaataaaatagacttaatcatgctaagtctatcaagatgtgacaattaacagaggcaagaatgggaatgcaaagggaatgttatttgccccagttgatagacatatatacatgcgaaagaatgatattttggacgcgaatacaaagaaagggaatctatattaaagaagtggaagataagtctcaaagagtgcatatttttaagattacatgaaaatattcaggaggcaaagaatttacaagtcaaatgatcaattttcaattttcttcatctcgctcagcctcagaagcacttatttcttcttcagattcttcatcttctgtcgcactgtatgaaatatcaaaaatatgttcattatcagggatttctgcaaatctatactttcaaagagggatgtcattctcaacgcggactttcttaacagcagcttcgcgagcacgattagcatcattgttattgtctgaaaccatgatgatgaaattcttcttcaattgctgatacttagaattgcgagaagataaatctttttctacagaagctaagcgagtttctaattcttcgatcttctgaggataactcttctcttcttcagaagctaagcgagtttctaattattcaatcttctggagataattattctccttatctgcgacacatgaataagcaggtcaggatatatataaaaaaatgtatatatattatcccaaagaaaagacaagtattaaaagagcaatattgaccttcataattggaaacaatgtctttaaccaatgcggaatgttcagcttgaagactcacattaatagctaaattctctctagcatcattcagaaccctagcagcccaactaaattcggcttcgctttctatgagaaaccgggagcggattaaatttctttcttcgacaaggatgttattttcgctcaaagctaagtcacgttctctttgaacctcaacaatggattcttggaatttttctagtgctttcgcacccttaagagcaatctcatctttctcatcaataagattattcttctttgttttcaaaacttgaatttgttcttggctctcatgaagacgacatttaaaattattaaatgtagtcaataaagatctatggctttttctaagagcagcatatttcaatcttagttcctccaaactcaaattttcaaatccttggttgggataattatttaaagaagaattaaggtgttctaaaagggtttcaccatcaggaagattggcaacctcatctgaaaggttatacaggtctacgaatataacaaaataagaaatgtgaattatcgcgtaaaaatagaagcacgagggaaataaatgctacataccaatgagttcatcatttctttctcgggatctgcgaatcaagtcagaatttgttgaattctcatctttaagtttgatattttatttctcaaatttagtaagtctcctttgatagtctagggagattacataagataaacgaggtccctgcgagaatgaaagaaagtgttacgattaggaataaagcaaggctaaaaaaaaaggcaaaaaggcaaagttgcaaatattaccaaagaactgattgtgtattggaggttcagatttatcgcataggcagctcaacgaagatatgaatcatctaaagtaggagcatcgcatattttagaaaccattctaaaagctcgatttaattattcattatcaacagcagtcagaagatctcctgcgaaaagattggacaactctttcaaagaagaaggaattgatgaattatcagaaacaagagtatcatcctcactagaaagaatcatatcttttacgcttcctaaaaacttcatccattgaacacatcctttttgatgaaattttagacgtaggccttttatgaatattctttcctttaattgaggtcttatcacctaaagacttcacatacacgaataagcaagataggaaacagaggcaacaatattgttaaaataaaaaaaaatgtttcttacttccttattctgcgaagctgatgcattttgtgaaatcttagtcctcttagcagcctgcaaaaaatggaattattatgcgagattgagaacattataaggaaattatgcgagactgaaaagatttatgcgaagccccataccactttctttgactcagcttcagaaagaacaaacttccaaggctcgtaagaagaaaacttctcaggaagaggaatatcagagccatcctcatctttaccagaaatataaggaccttttataatggcagggcaattaagccagcttgattcattagatctgcgggcagaactgttagatttgtcactccaatcaacatcatgatcttactatcttcagcaataccgtcttttcttcttaaccgaacggcccatttagtcaaattactcttataaattgcaacataatagttgttgaagaagttatcaagagtgtattcggtaggatctataaccttatcacgatgcgattcttttcgaacttcataagtgtaaaaagtccctaaaccatatgcgcgaagagaatattcatatgttattctgatcgcatcaccacttagccggaatattccccgtgcgaatcgaacatcagcaagaatttcatagaatatgggtatttctaggttgaaatgaggaattggaagaatggaaagttgtcccaatgaaacaataactctttgattgttccattgatcggaattgatcaaaccaagattaagcttggatgaaaaatcagatgatgggggaagagaaagtgagtaacctctcgaatgaaattcattcttcaacctgttgaattctgtctccattttcttgccagcaggagccatttttagaatgggaatggagatgggtaaaaagaaaatggtttgatgaaacaaaattagctttgatcagagaaaacagtagcaaagaagatgaagcaaaaaaaaaatatagaaaacaacaaaaaaaaaaaaaagacgagtgaagatatataaagaaaaagtagtcccatttttcgagatttcattaatgcgaggaatgaatggataaaaacaggcggttaatagaacatgtcaaataataagtggttaaaaatgcacgcgtaactaaggaaaatggaattccggaggaatgtcggcaaggtagaatacgaaaagatatacacatgcaatattataggatggaaatttctcatatcgctcacttcacaatgcaggcgaaatgagaagaggcaaaatgtaggagtggaatatcgcacatatcaataagtatgcgaagtaaggattatctaatgtaagcgaggattatcgcacatggcaagattgaagtgacgtattggatgatgtcagtaaaatcacgagtaaagtgtgatgttctatgcgagatatagtttgtgcgagagtgagtgattgtaaatgagcgaatgaatcgcacaatgattccgaaaatagtggatctcttagctgtcatccactatgaggaatcactatataaaggaaggaagtcatcatgaaaaaaggagatcttttagtgaatgttagacaagaaacgaggagagagaaagttatttggagagcaagtaaagtcattgtaaaatcaatatatccaattataatctttgaaaattaatagaagattcatgatgattacttgatttgtggtttaaataaattgggatgtggttgtagattttcctgcaactacagtctgatttgcaaagataatctaacaacaacgaaaaacaatcaagtttgttggttatttgactgatttagagtgattgattagggatgatttttgttgctttcactgccttttggagtgtgttatttttttcattgaacgaatggtctgagctagttaccactgcccaccagtacctgttttgaccatgagatgtctatgatcttagttaccttccggtctaagtcaaagataatctaacaacaacaagaaacgatttgttggttatttgggtgattgttgtgaaagagtgggaagctaatacatgtggctggggtctttacctaaacctacagtctctcactaagatgccattgccctacataacctggtgctacaactaaacgtcactgtcaagattcatcgttaaatttgagctgtccactaaaattgagatagactccagcattcagtcatatcataaatcaaacatttgtacaccaagaattttcatttcgtctcaactttaatttggtaccataataacataaatgtagaaaatgaaatgaagcttcctgcagtgaaaaaaataataattatatcatgccactgcccgagaaccaacatggatcgatctcgtgtcaggacggttttggtcgttctgaaatatatcaattactgaatgagcaccaccaccaaccccgccattagtggcggtttctaaagcaatggggttaagattagagcgacaaactggacaagtagcatgagaaacaaaccaactatcaatacactcccggtggaaaacgtgttgacatttaggtaataatcttaaaaaatctttatcttcatattcacttaaacaaacaacacaatcatttaccattccttgagtagaaatctccttaaggttcttaatgtcggagtagaccaataccgggaacatttcgatgaccactgaatgaagccctccagctgatgatcgtcctacgaagttattaggatcaattctactccctcgttgttcattgagaaaatgtattcgaatacagctagctaataaaccagttaaggaaggcacacaaacagccacgactacaataatcatagtaaatccggttagaatacaaactaacattaatacattaaaatattcttcctcgttatgttgcttattatcgttgctctgtgcagaggtgaatggtagtagtagtaatagtagtattaacttgatggaattgagatacaagacaccaatcagaaggttgatatttttttcgatcatgatattcgtattcgtagaactgagtttgtgcagagaaaacctttttaactacatgtctttagatgttagtagaattaaaatgttcgaagaattaaaatcttcagacttagaaatatttggagtatttagaagacttagaaaagtaagtcctgtgatctgactttcaaggaaacttggcagtagctttccatatttttttgaacttgtgtcggggtgtgaaatttgagacatatataaaaaattgaacattcaactcctgtcatactcaggacatttttttctttgtaataacaacattcacgcggataggtctaacaattaccacaaaggggatactaataatgacattctgaaaattctagttttaatggaagagaagtcattgaaattgttcaatggaagacgctacttactaagacagtttcaaatgccgctccaaggtcaagggaaatagaaattgctgggctgaatactggtaaatgtcgtcccaaaatggtggaggcaccgtttaaagcaaataaggttgtacggaaacctcttccatctattagttcttcctttcactgccaccatgatgactttaccgaaccgcgcgcctcatatcgtaaaagttacgcatctcttataccgattcaattttccattaacactagcctttctcacatcatctagtgatcccaatgtatacctctcactattttctggtaccaaagaatgtccagttgaatgcgattttgaaagtccttcaaaagggtttactgatcttcctgtagtctgattcgggttcatcttcttcttaaggtttaaattatcagttgcttgttccgaagtctctgccaccgaaactgaaacatgggtttgctctgctgatacattaatcacagtcattgtcgactcagaatggttcccatcgtcttcaaatacatcaattacagtaccacctgaattaactgcagcatcgggagccataacttcaattttagatcgacaaaccggacaagtagaatgagagataaaccaagcatcaatacaatgacaatgaaaaatatgacgacatgtaggtaatagtctcaacatatcttcatcttcgtattcacctaagcagacagcacactctactactctttcattagaatgaatcttcttcttattcttaatatcagaatagacaaacaccggaatcgtttcgatcacttttaaatcaagtcctcctttgcttgttgatgttagagtagtaacattatcatttaggtgacctctaatacgtctttgctcattaagaaaattagttctccaaataaaaagaatacagtaaacaaccattaagattatcccacaaacgaatgcgaccaattctgtttgattatcaatgtggagttctggaatccatgaattacctttgtcgctttgggcagagttatatggaagtaatgaaagtattagtagtagtatcaagtagatggaattaaaccactgaatgttaatccaaatattcttattgatcatggtctttttcttctcctttgacatggatttgtaacccgaacaaaattcaaacatttcagctgcaattaaacaaacaacacaatcctaaaaaccagaactctaaaaatgaaatgaacagagattgatttacttacgaaacaatataagttggttgattcttcaaagaatttcactgaatcggacaataatgagaagaaaactaagattttgctaacactgatgaaacccttgttaaggctgtattcgaaatgaaggaagaggaatcaaggagatagaagtgatagtcataacggatttggatacgttacctaaatttcctgcttacgcgttttgatagttatgaacgagtttagagggtttttggatattaatgctgtcaagtggaaaagctaatatgggagcccattttcagaaagacttttttaagtaagtgaacaaattttttttttaccgttgacttataaaatgatttctttatcctgtgcatctataagaatcaatcattggcatgaaaaaatgtaaaaaattataaaatatgagagaatgattctttgcattgaagaatgcatttgtagagagagaagttcaaaaattcatgaatctttgcattcccaagtggaaagaattattctcttatattatatactattttcttacattttctcatgtcaatgattgactggtatcttatgcatgtatgcactagataaaaaaacccagaaaaaaattactacttctttaacgagttatgcttttgcttatagcttccggtatggtagcacagacgcttctaaaatgatcacgtgttcgtgtcagaccgggcccgacatttggatgcgtgtatctggaggacagacacatcggtgatatcagatgcagatgtcacgtactattctaatatctactagaagtttttaaatttttagtaaatgtattatttcatcggtatatatgtttagtcttaaataaatctgttatttatcaataatttgttagcattgttgaaaaattacattaataataatatattttagtggaaaatatcactaattttcataacgtgtccacatcctaatattttgagaatttgttagtgtccgcctcagcgtcgcatccgcataagtgtaccctaagtcccaaacatgttttcttatactacctccgtttctgaaaaaaatgttattttttatatattaacgggcagatttccaagcctcttagattatcacctaattttaatacatgtaggagattaagatcatagaccttttcatgccatggacttcaccgtccggttcctgcgccgtggacctcaccatatcggattaaagcgttagttatttgggtcccatccatgcctgtccgggttaaagtagaccatagacctcaccatctgtgagaccccaggttaaactactaattgtgagagtggttctctataagaattaagaaccgaatcctcgacttccgttatgtgaggcgagtgtcaaaccatttgaccatcttcttatattagctctaaaatgatgtgcttggtaatttgccccaacagacgtagcatgaatggaaccttaatttcatcactttgaaacaatcgctacaagttttttttttaagtaaaatcacaaggctaagttttatggaactagttttgcctcttgattagacaaaaaacgttgtctattgttcttttctatttttctgtccggatatatctcgaatgctaactagtagttagatagttgtgttgtttcattcaacgcaaccaaaattcgattttttgcggaatggttcggcacatctagatgctagattggaatgaccataagatttggatggatattctaactgacctggacttccaatctagcatctagattggaagaccataagactaaacctaaacacaaattttgatcagaaagctttcgcgacacattaatattttttaaaaaagaacaacataattcaccaatctaacaaaaagtattcctcctccaacaccaccattagaaccaccaaaacgactattcctcttgaagatgacttacaattgaaactccattaatgaaatactcaatggtttaataatctctctaaaatagtctaattttctgaactgaactaggcttaaaaaaactaaattttaaattttaacttgttaataaattttgctgatctgaaaagtattaactcagagagtttcaaatatactttccctcggcctcatctatgaattatatcaattactgcatcaggagagattccagaatcgatagctttatactcaaagcgacaaacaacgccagtagggtgagaagcaaaccactcatcaatacactttgcatgaaaaatatgatggcttggtaataatatcaacttatctgcatctccaaaatcatcatgaaaaatatgatggcttggtatctgttacagagtttcaagagggttgtgggtaattaccttcctatcctcaacttaaattgtcaagttacattgttacactccattactactattagcgcctctattactactatcatctcccaatttcatctcacacacaagggctacccagcctcccaatgattctggcttttttctccaacatttttttcccattataactcttcattttaattactgaaaatgagaaaaaaaaatccgaaaacaaaattaaaatcatctgaaattagtttttcatttaatatgtttgaaggttgggaggtagataaaaaacttaatgttttgatagaaaaacggttgagacattacgacatcatatctttcacctccatttatttcacatctcaccgacttcttggtatatcccttgcagtcgtcatcaatttcaccgtaaaattcatcagattcaatttgagattcagttgcatgaaacttcatcaacaaaattgattcaaccgattcttctgtgactcgtcgatttcattaaagatttaagcttaatccagttatcacagaaggattgagtttgattaagatttcctaatctatcgattctcctgggttatcttcaactaattattatggtatttcttttattgttttcttattcgacagtttttcaacatatggggtttattaattttaataattgatgttgtgaattgtattctattgtggtgtgttgataaatctgtgacatttttaggtttagttgataaacttaggttactaagacatagtactttacttgtttgtaggatgtcaaattttgtggataaatcttggatgcgtataatagacatttatagcccaaaatacatagaagaggttagaaaattcattgattttgcaatggaaaatggtacttgtgcaaaaacgtgtgtttgcccttgtaggaagtgtgaaaatagacatcgacttggattcttgattgtgaggaaccatttgtatgagcatggtgtcgacaagacatacaccacctggagattacatggtgacagaaaggatggtgctttaacaagtcgttctaaggggaaggaagtagttgaagaaacgcctgataagcaatcagattgtttgaatttgaatgattttattgactcttcttttggtattcatcatggccatgatggaacacaaattggagaatcacttagaagatccagaagttgagaatcttcttaatatgtaccaatcgttagcggcagagaagttatacccttcatatgaagacaatcccacaatcctctctgatatggtagaactacataatctgaagaaaacttataaaattttgggtaaatgtgtcaacagtttattggatttgttaagagagtgtcttccgaaacctaacaagtttcccaaaaactatgatgttatgagctcaatgcttaaggatctggggatgaaagcgaaggctattcatgcttgtgagaatcgttttattctgtattacgaggagaatggggatttaatagagtgcccggtatgcaaaactctgaggtttaagttgaaagctaccaaagatgatcctgtggtgacaaatgaaccttgcaaagtgctaagatactttcctgtagaccaaaaactaaataaaatgtattcgctaccttggatatcagacgcaatgttgtggaacgatcgagcgcaagtttcatctgaatatatgcgtcatccaatcggttcatctcagtgggcacaaatgaaaatgaattttccgttgtttgcagcggaagtaagaaatgtttggcttcgaatatcaacagatgggtttaatcctcatggtgtacatactttgagttgaagttgttggcccgtgatccttgtggtttataatcttccatcctctatgtgtatgaagtctgaattccaactgatgactctgttgatacctggtttaagtcatcgggtcaagacattgatgttttttgcgtccgctggtcaacacgctaaaaaaactttggcatcaaggtgtacaagattttgattctttgaaaagggagtattttactctgaaagaaactctgatgtttggcattcatgacttgcctgctcaaggtgttttaagtggatgtaccactcatggctattgtgcgtgtgtttgctgcggagacgaaactcgaagtactcatctaggttatggcagcaagtttgtgtacactaactatcgtatattccttaagtcaaggcaccaatttatggatgagactcttttgggattagagacactgagcataaaagtgcaccgctgagactaacaggagagcagtcgcttgagaagttggacgatgtttaatacgaacctggtaagttagtggtccgcaatacaggtaaacgaaaaagatatcagtctgatgaagaggaaggtgattctgagcttgtcacaggtactttcttcaagaagtgtattctttgggaacttgagtcgtattgtgccttggctatacgacattttgtcgacgtgatgcacacggaaaagaacgtcatggaacacattatctacactatctttgataaggataataatgttattgttgcatggaataatcttgacaaattgaaggagaataaactacactgtggagagtgtaaagagaaggaaacaaataaaggagtagagatggttccgctgtttgttttgagcaaaaaagagaaaactgatttttgtcatattcttaaagatctgaaagttcccacaggattttcgtcgaatataaggaacaatgtaaatatggagcaattgaacttgagcagcttgaagtcacatgactaccatgtgattatgtggtacttattacctgttctgcttcaatatgcctttccaggagagaaagacttgtgtactgcgcttcaacaagtcagtttgtattttagaattttgtgctcaaaggtggttagcacagagtatctgaaccaggctaagtggataattgcagaggccatgtgtgcgctcgaaaagtatgtcacggatggattttttgatataagcgtgcacaacatggttcatttggctgatgaggccttagtgtgtggacctgttaggtatcaatggatgtacccattcgaaaggtgaattgttattttaccatttttcctttatttttatttatttttgttgtttttgtactgaaatttacacgtacatactgagtcagggaaatgaaggagtgcaaaaacatcccaaaaaagagcagatacattgaagggtcaattacgaagtcgactggaatggatgattgtattagattttccatggaacacatgaaaaatgccgatcaaggaggtcacaaagaaaatttggagcccttcttaaaggatgaacatgaattcagcgatgtgggttctgtgcttgatgaaaaaccagttcaggtgagccatattcagtggatgcagatacgtcggtgggtaatttttcggaataatccagaaggtctcgatgtttattacaggtattggttagctgtgttttgtttgtatgtggagaatgggttattctatttagattttaatactatgtatgctaaatgtagggtagcgtcatcgtagctggcgtctcctcagaagaagtcatcatcctcaaaaagtccctgaaaaaaaatacaaaaagaaacgcataaaaaggaaagagaaaatactatacaaaataaaaaaaaataaactaaaaattaatctaaaaacaacggtgaagatgaagtgccctgtttgaattgtaaaaaataattatgaggttggggaaaaaaagaaaaaaaatgaaaaaaatgaaaaatgaaaaaatcatcgttacgttttgttcaataaggccaaagggaagtagaaatttataagtcaaggaagaaatcgaagggaagagttaattgtcaaggttctatgaggttcgatagttatcatcaacagttgaagaccgaagaagacgttgtttctactgagcactatgagagagtcgaagaaagataaatttggttgctttgttagtccgctttcaatctgaaacaagatctttctagcactggtttaactcatcacacgtaattagtccagctgtaaagcagcggatgcatcttacaatgtttatctagctgtgtagcggatatctctttatctagcagtgttgcggatgtgtctccccttttcttcagtcagctttagagctgacacctttaatttctctggcattctagttacttggagataggttgagaatatgtatgtcctcatagctctttggatacttgtgaccaattagaagtaatggttttgtgggtacacctctggtaaaccctcccgagattaactcagttttattttttatttgttttgctcgaggactagcaaataataagtttgggggtatttgatagacacatttttgtgtctaaattgtactcaatgtctctattgttagtgctcgatttttgtactaattttgatgctttgtgtgtttgtaggtgtttttggagaaatacacttgtgtgaaaaaagttgctcaaagagtgctatttggactcctggagaaaagtactaaaggcaccctcaatttggataaggggcacctcagttgggcacctgctattcgcacccccagtttggttagggggacaccatcttcaacatttcaaaaattctttttggcgggaaaatattctttgtgtctgcgtaatattccggagttaatttggtagtgatttcatgagatattctcgtgaaatttaagtgcaaatatcatgttttaccataacaagaatggtaagtcttttagtttcgcataaacagggataaatcgtgtcaacatacaaaacagtggagaaatattcacacgagattttcatgggatttcctgtgcatattagaagataacatgtgtattaacagagttatactccagctgggacgtgaaataatgtgtttggaatatcccagatagaaaataacgcgtgaaggatctgtaaaaggaaattattcccgtgactggaaattcaacggagaattatatgcagttatgaggggatatctgggggcggtgaggctatataagtcgtggaggatcagtagagtgaggacggagagtctgggggctgaggagagccagataaggagaaattcgagttttcccaaactcggtttctgctgctgctgaacacgaagaacgaaccatgcaagaccgtcgttttccaacagtaacaacgactcacagctgtgggtcgtacatcagaggaagacttatttgtcagcgtttgcgacacagagtcgtgggtcttagagcaacagtatcagtgacacatattgtgggtcgtagttctctggtttgtaacaaatataattgtaacaaacccggttttgaattatttctccattttcatcatttgtaaacaccctttgaacaataataatgatttttgagcatgtttccaacatgatgagcgactaattctcccacaaccaaggaaatgaggaagctatttacgcatgaataattaataactattttattttctctaatatttgattataattcactcaatcactgcttttgcagagttttaaattctttgcgtaattttcctaatcagttgtgattcaattagataagttatgctttgtttatataatctatgcttaagggatacaattgatgtttgagaatttgcttgattatcagtgagttaagatataaaggacttaaaagataattagagttttggattatttaccatcattaattcatgtgtaatagtggaatcagtgtcttggttattttctcatatctctctcccattttgttaatatttttgtatataattttattaaatctttaaatttaatattcacaagtccgagagtttgaacctcattactaaaacatcattgaaaaatattatcacttaatgcatgcgacgttgtcgcaaggtagataaataattattctcctggttctgctttttgtaaaatagttgtattcataagatgttctttgattccttgaaaacccttttcacattcattactctatttaaattttgcacccttcttgagtatatcgaaaaaatatttgcatttgtccgatgatcgcgaaatgaatctccccagcgaagctagaagcccattcaacttctgtacatcttttaatgttgctggtgttggcatgtcacgaactgcttgcactttttctggatcaacttgtattccttcctttgatacaatgtagcctaaaaattttcccgatgaaactccaatagtacacttctcaggattcaatttaatgttatattgccgcatttgttcaggaatctcccttaaatcttgtacatggtatttagattctttactctttactaacaagtcatccacgtatacttctaacgtcttgtgtatccattttgcgaacaccttctctaccattctttgatatgtcgctcccgcatttcgcaaaccaaataacatttttgtgtaacaatataaacctctaggggcaaagaaagcagtatgttcttgatattcttcagcgagagggatttggttataccctttgtatccatctagagattataccctatcgtctcccgctgcggattttaccatttgaggaatatctggtaatggaaaattgtctttggggcaagctttgtttaaatcagtgaaatatatgcaaatcctgattcctttgtttttctttgggacaatgaccatattctctattcattctgggtatttagcttctcttatgattcctgcatcaagcattttctgtagttcttcttctatttgggaatggtaagttgttgcaatttttcttattctctgtttaaatggtctcatatttttgttaatctccaacttgtgacatgtaattgatggatctattcccggtatctcatccatgcttccggagaaaacatctttatattctcgcaacaagttaaacagttttttcttcttcttccttatccattttggttccaattctcaatattagaggttcctctatagtctcaacgtttatttcttttgttggttctgcgactgtgtaactgggtttaggttctcccattggtgttggttcttttattgttttcataggatcttctccttcttccgaaatttcgctgggtattcctttggcttcttttgcccttatcatatatactctaaattcttcttctttctttgcttcctttgccaattttctgcgaaattgtttcttttttgcttgtccttcataatgctttacttcaatctgataacataatttcgcattgtcaacatctcctctgatttcacttattccatttggagtggggaatttaatacattgatgcaacgttgataccacagcttttatcgcatgtatccatgatcttcctaataatatattatatggtgattccatatccagtacgtataatgttacatgtgtttcgatttctccaagtgtaattcgtaccactctctctcctttaggttttgttgtggatttttcgaagccgtgaacaaaatatgttgaactggacatttcttcatgtttaaatcccattcctcggagtgcgtgataaaatattatatcaactgaacttcatgtatcgattaaatttctattcaacatccattctcctgtggattttattgttttctccttctcttttcgtgtaataggcattatgatgaccaacggagatgtgtggttcacattttcttttggtatttcttccgccatgaatgcaatttttttcttttcccaatctttcaagggtgatgttttttctacctccataacttccttccttcaaaatttcgttgatgtattcttcctttgatgttttcatggaattcattaatcatcgtttttgttatcatattacactccaatcttttgccattttcattaattctattcatctttcttctaactgattcactgatttatttaatcactttcttgacttgaatattctcaatcaacaatcttcaactttcgatcttcaatctccctgtttctagcgccattatgtagttgcaggaaatcctacactacacccctcgtacgattttattattaatcaacccattttaggattaaactctttattttatggaacaatctttgaatatttttacaagaaaaaataaagaaatcaagaatgatctctgttctagactttctctctctcctgtttacttgtttcttactcaaaaaagatcttcctcatctttacaacttgaacgactatttatagggaaatacatagtggaagacaactaatctgtcctttatttttggatatggcttgcgacattctagcaaccttacaaatgttaatttcgcaagctctctaattttagcaggactatcacatctttctcatgatcctagctgacgtcgtttgttatatgcttccagaaattgttttgcgacgctattgtgttgtgcctttgataatttcgctgagatattattgttgcgagattctgatcctacaggatgttattttcggttttggttttccgctatgagggaagtgttttgtgttgaataaacacaatggatgttagttggagatgaataacacctctaacaggtgtgatggttcagaaaggacacaaccattcccaatagacaccttatgtgtcttttggaaatgaagaggcatatacaataggcatgaatatccctattagtggtgaaggtattctcccattcttatcaatcaattctacttgttttctctctttctaaagcatcatcagaaatatctctcgtgtgttcttgattgggtcaaggggtgcaaccttaaatccaatttctctgttgtagggctttcattgtatcctgaaggcattatttcgcatacccgttgcaatcgccaattgatattgggagggtagaaataatcgtctaaaagaaatctattcgagccttgaaagtcacgagtacaacaatttctttgtgtttatttcatcctctattttgaacccattttccaacagttttagacgattagtttctctacaaaagagggtggaattatgttggattatgagcacgtttttggttgaaaaagaatttcgaaatcactgtgatcttgtggaatacgtgggactctgttttatgacaaaagttttgcttctgtgggactctgtttgatgcgtcaacagaaaattagtattctatctattagatataaggctaaccgctatgggatagatatctagcagctagattggccatccacgtcagccagagaaacctcctaagtcctatggtatttctaatctagcagcgaaatgctgaataaaacagcgttgaacgctgaacaaaaaaacgtcacatgattttatactaatcactacaatttctctctccctatttttgctatgtctctccaccttttccctctctctatccctctttttcctctgtctccaccttttctctctaaaatacgtctcactttctttctctaccaaaacatttatctagggctgaatggttcggcgtttatgtcactttttcagcgctgaatgattcaacgtttcaatctcgctactagttgaactgtgaacagttgataggagagagaaatatccagaagtagtgttaactttgttcccacacttttttcttgatttgcaacactttttggccaatctagcagttcaatctagcccataggggttaggcttagtcctatgggctagatatctagctgctagattggccatccacgtcagcatgagaaacctcctaagtcctatgggatggctaatctagcagctagattagcagcgggaccaccatataacgccgaaccattcagcgctcagtgctgaacgattcagcgctttaaatctcagccgttagatcagaaaattttctcgcagcgctgaatggttcagcgtttagaccactttttgagcgctgaacggttcagcatttcaatctcgttgatagttgaattgcgagcagttattaggagagagaactatcaactagcagcgtaaaaaaatttcccacacttttttaatgatttgcaatactttttggccaatctatcagttcaatctagcccatagggattagcctaagaaagtactgcccaataatctctaaatggagattgattttaaacgcacacaaaacatggggagacttggagtttctttgcacccatcgttaccttcttcgctgaattctttgtgtgcctattgaataattaatattcttattaattcatgaaagttttcttattaatcagtttgatttcttttgtttccggagaaaataaaactagaagaaaaggaaaacgggactgaaggggtaagaacatggagattcggagaaactgcagttgtgactcccctctgccgttaggagaactgtcttgtgttccgggtttgaatcaccataatttgactatcgacaataaatggagaatccgtgttgcgagtatgtcaaacctaaagcacttcagtgtgcaagaaatccgatcttgaatccattaatggagtcgttcataccattgtcattgttgaaggcaaaacccaaagataagtcgttttacctctattaattaatctttgatatttcatggtgttccgttgaagggtggacgacgcacaaagaaaccggccaaaagagagccaaatccatatcggatttgaagatacgaatatttggattcatgtaatggtgatacttccattgatttggtcgagatgcgagcaacaaagaaaaacggttagtataaatgaatttacatacttatcatagatgcatgatataacatggtgtttcgatgatttatattcatctcaatatgtcaaatccatgttggaattgcataggaatacacacatagagatgtcagcatttcttattatggatttgaatctctttaaatcctgaggattattttcggttttgattttccgctacgaggggaagtgttttgtattaaataaataaaatggatgtcagttggagaggaataaacacccctaacaggtgtgatggttcataaaggacacaacaatttccaagagacaccttacatgtcttttggaagtgaagaggcatctccaataggcatgaatatccctattagtggtgaaggtattctcccattgttatcaatcaattcaacttgttttctctctttctaaagcatcatcaaaaatctctctcgtgtgttcttgattgggtcaaggggtgcaaccttgaatccaatttctctgttatcgggttttcattgtatcctgaaggcattacttcgcatacctgttacaattgccaattgatatttgagagggtagaaataattgtcgaaaagaaatctattcgagccttgaaagtcacgagtacaacaatttctttgtgtttatttcatcatctattttgaacccattttccaacataggatatcgaatggactagtgtcattatctctttgtgcagaggtgtattgcagtaataccagtagtaggaacaactggatgttaacccgtatgttgatgttctcctttgccataatttcatgatgatatagctttgggcatgaatgcaaatcttagtggaggtatttataagttcggaaaatgggtcatttgtccaaatatttttaaagcacggttcaaatggacgggcaaaaaatagtttgggtggaatggtaaaaaaaaatagtagcttaaatttaaaaaatagcaaggatgaaactggatacatcctgtttaaattaaaaataagaaaaaatatttgaaaataggcacgatgagattggttacatcctgcctatttttatatttttggccatttaagcagtatcaaaatctaaatgtccatttcacccaggaattgttgattttggtctttttaaccgattttgtgttataagttcggcagttggggcatagaggatttcatacaattcgacttgatcagaaattagaggcgttcagtccaccttattttagtttaataaggattctaattagtttgaaatttttgtattcctttaggttattggattccattgcacattgaagagtccttgcaatttccctattgaacgagattctagtcataacatttattcttgaaagggaatgcatgcaattatctcccatgctttttgtgaaagaaaaaaactacattgctgataaaacacaaaaaaccatttccaaagcaatgctattatacatgcatctagccgtaattgagtttctcggaatctttaacatccttgtactataaaagaagtggttctttacccacagcgcgaaacaaaagagagtaatagaattgcgttaaggaggcaacaaaatttagtacctgaaatctaatgatgttcattaacataaatatatagttaaaatatagaactaactaaatttcggtaaggatgttcatcttagcctgaatcttaaatgcaggtcgcatgcatggctctcaagcttcatcaatttcggtaagtagatgttcttgtaaaccatatcgttcagcatcttccgtcacatcaattctaacatcacttgcaataagtgtggtttcaggaacaatagctacaagaagatcagatctacagtaaggacaagtagtacgagaaaccagccattcatcaatgcattctgtatgaaaagcatggcgacatggtaaaaatcttaacatatcttcattttcatattcacttaagcaaacactgcatttttcttgtacttcttctttattcttaacagcagagtatacggattcaggcagcgcttggatctcctttgaatcaagtaattgtttttctgttgcttttcctatagcaacaatataacttatcccagcccgtataagccaaacacaacatataaacgctatgagtacccaaacgcttaaaattattattgcaagaaatttcatctctgcggatggcgcatcactatggctttgtgcagaggcgtatggtagtaatagttgttgtagtagtatcgttaacagaaggttgttattcttctcaaccatgacactcttctcgtttgacatgattttgtgatgaaagctttgggtagaaatttttgtaattcatgtcttgcaaactctctttatatatgtacaatgtaacaagaagttgggtgtcagaaggtttaatactccaactgggatttggaattagtggcgcatcagaaagaaatatccagtacacgttttcgggtacattgtttatgaactaaaattaacggcagttaattcaacgaattttatacgcagttagaagtttcgtttggaatttggagtaattgagactctcaaaacctatctagtaaagaggtgattttttcccacggcgccaagcacaagatcgagtaatggaactgccttaataaggcgacaacaaaattttgttccagaatctaatgatgtaactgattccatcaacataaacaacaaatttatagcaacttagcaagtggataaataatatgaaaattagattgaattaaatctggataaatgtttatcttagcctgtgggttgctcgtggctcacaagcttcatcatcaatatcagtcgtgaaactagacgcaaaaagaactcctcgcattaaaacatagtggcactgaaactacccatctatctgatagggaagttgtaaaatacttccctctattactacttcccgcgccaccacttccaccgcgaccatgatgactgctcccacctgaaactttccaataattcaatgatttccgcctaataattcacatcatctggtaatcgtaacatatacctctcactattctccaggccttgtcgtatcaatgaatggccagttgaatgtgatctctggagttgtgctgtaggccggtttacggatcttagtatattcttactagcatttaactggctcatctcattgtcatggtttatacgatcaaccattttttctgagttccgtagcaaaggaattgattcccggttctcttcatgatgttctaattcagaaaccaccgtcccttcggaagggttttcatcgtcttcatatacatcaattacagcatcacctacattaagagcggttccggcgagcataattttaaggtctaagcgacaaagaggacaggtagaatgagaaacaaaccaattatcgatacaatcaggatgaaaaacatgattatgatgacagggtataatcttaacatatcttcatctccaaattcctctttgcaaatagcacattccagtactgtacctagattcttcacatcaatgtaaacaaatactggaaacgtttcgatcatcgctgaatcaagtcctcctacatcaccaagcccttctaaatttgatgtttctatagtaacatcaacaggaatatcagcggcatcatcactccgaccaaaacaaaagaattgtgactaccatttttctaacagcacaatcatatgaacaagatcctgggatcttgatgtaaaccataaaacagtaaataaaagatgcaatataaacaagtaaataacaagaaattcacacagataattaacgtggttcgacatcggagtgtctacatccacggaaaggtaaaagaaagttttattatggttttgatatgttacaaggttgatgaactccattaaccatgatgaagttcaatgggagttcttagtaacgaatgtattacgaagatagaacgaagttagaacaaaggtcataatattacccagctatcattcctctcttcaaaggtagtgggtttcttactcttccctctttctctctcccaaaattcgtccctcttttcaccttatcttcactgctttataggaaaagagacactagtttattacgaaaatggcatctgcttagattctaagctaactcggaactgattcggtgtgtggcgttgtatgcttgtatacaactgcggcttctaatcatcctccacgtgtccaagtattttatggtgtatacaatttgcctcttttcttgagggttgttgatgaacgatccttgagaaaaattactcatgccttacgcttccatgcttttatcagggcttccttcttctggattccattatcttggctacaccagctcgcctcgactgctccttgttgaaagactttgcactcttcgtggaggaactccggtgaagaatataacacgacaaagtattaatacttgcccctatttttcactgaagctctggaacatccagaaacaatgagattcatactaccttggtttgatcttcgtcagtgtctaatttttagtacttggcttgccgcatgtatgcttcaagttgaagacacgtatttcacgactccaatttggcagcgaggtatgctcaacgatattgattggtacacagctctggtaagtccatatggcatcaggtatgtccacggcaatgactctccttcaggtgattaggcattacaacgacttcgcagcaccacgttgatagcagcagcaacattggttgtcaggtacgcagcaacagaagcctttcttattggtgcaaataatattcgcgacttgcttgtgtatgattcgggcttaaagtactttgtagaaacagttgggtatcagctctggatactcttatgtacgatgtaaccgtctgtagcatctgttcgtcgcagcggcagttgcattgattcccccttcggcggctggcatacactaccttgtccttaagtacatggcagcaacaacgacatcgattcagggatcgaagtccagagaggatgctgcaaatgcttgaattttcgttcgatggtgcaaccaacccgatgatcctaggccagacaatgatgtaaaatccgatgagattgcgagttaacggaagaatgctccgatccttcattctgacgataattccatagagaagtatagcacggcaagaccaattatcggaagtattgagtttgatgcatgaggaccaaattttggtgaggcgaataacaaaagtttgataatcaaagtatccaaagtatcgaaagtttgatacgctgtcctgttgacccgtaatacaagtttcccgaaggtacgaagtcacgacggtgcgaagtagatgaagatccaaaaaagaatgatctcccgagggagactcggtaaattgtgataccattatttggtatcataattacagctacgctcatcacatggtggcagcattcggaagcacccgaggcaacaatgatcgatgacgaatagaagtatgataagaataaaaggaactccgcagtaaatacttttcgacaggatgcatgaagtataaaaaataaggagtaccaattgttgtataagtacacttcataagaagtataaagtaccaaaataagaagtaccaatccttggagaagtatgaagtatgtccaatattaagtatgtcaaatattaagtacatgaagtataaccgtaaccaattagaagtatgaggtataagagagtaataccactcttttcctttaatgaagcactgccccttgttgaatgtcttgggatctttgtcaccccgctggcttcggtccattctccattgtgattgagcatccaggtgcatcggaggagtcgtagtagcaacagttacacgtagcaatcaccggcgcgtcatcctagttccgagtgggaggtattaatgcgggtattagcagcaacattcgttaattgtgagtgtgtagtagtgacttctcgttggctttagcgggtaagcatcagattgcttaggactactacattcctgtgtagtctcaattgtcataaaaggatcagtgtatgttataagcaataagatgaattcatggtatgagtgataaacaatattatataaatgcttataatatggttgttcttgcccctgtattgtgagaatttgtaattccatcctcgcataggcaaaatgagtgtttgaacctgtcatcccgttggctaattccggaccaggaaattaccgaacggtgggggtttgagaatctcccagagacgtggtgtaaaactgaatgttttgcaaacacccgttctgttgagctgccaaaaacatgacatgttgggtatctctttcttatggaatccttctcctggtcgtacattgtacactcataaacacttatgggggagtttggagagattacacgcaagtactttccccaatacgattattttagaccggtggtgctggccccggttttccattgtatgcatcggtatcctaaaagagtggtggttcttgccccggctctcttttgaatgtgcagaatgagaatgcgaaatgcatcgataatattatagaaatgtatgtctatgcattttaaaatgtatgcgaccattgtcaaaatgcaaggggtgagtatttacaaactctttagttatatgtgatgtatgtatgccccttttggtttcggaagcggattgccaaagcttgggaaagtaagggtaactgccgctgcatctgttgacatggccactgtcattgcttctcgctccgctctactgttaacgctttaactatcactgagctggtgctcactttcttgaatttgagttcatatcctggtggtccttggtacaagcttgacgcagcaacatgatatgcttcggtggaacacgataagcttttctcgatagaacctcaaaacttcgctgactctgcatttttcgtcattggcactactcaaggtctgattttacattgatgttgttgatgaaatgtactatgaagtttgagctgcatctttagtcctggattccttcgatttgaatgcttaagcttttgtttgagctgcggctcccactattatcacttgagctgtggtatctgcataaaagtaaagagattggaccatgccccatcgtcgtcggccttacaccatcgttgcatgactttgcaccgtcgtcatcttacttggcctgggctacgctgctgttacattgcggctgtactgcaacatttgattggaccgaagctattattggaattaaggtggtctgtatcgtcgtcacaggacttgagtcatctggtctgagctttatgtgccatctcttgtacaggaactgccttcatgaagatacgaaagagatatcttcatatctctttggtaagggatatcttcattcatgaagatatgaaagagatatcttcatctctctggtcaagcatatcttcagtcatgaagatatgaggttcagacagtgagttgtagagtttgtgcatcgtctttatcccctatggatcttcgttttcaaagatcatcgtcgttagaccatggatcttagtctggtggtgcattggttttgatacatcgcaacaaaactttgcacaaccgtcattggatttgttctgcgggttaacgaagtaaaaaaaatccgaagtatgcttgtaatggataattccgcaataatgatggctaattcagcaacaacgatggataattcagcactaatggataattcagcaatagcaatggctaattcagcaacaacgatggataattcagcaaccatgattctccactggttgattgtacgctcttcttcgtcataaaccatgttggacatgtcctttgggctttgtttgggtagcgtgtcaaggtcatcgtcttcgtctctcctttatcacgctgtggctgtaatctccttcttagatcgagttgatgtgcaccagctggtctcctcgcacgagttaccatcttcgtcacaggatttgatatcatcgtatcactttgtgcttcaagtatctttcacgtcgggtaacttgtacatcgggacgatcatccttgtcatcagaatttggcttcggtccaccgtcttcgttctttggctcgtcgtctcaagaccttgcagcatcggagtgggaccgaagccatattggccaagcttcttatgcttcttagcagctaactaggacgatgtttgcagcaaaaatcatcatctttcagcaagccttcgtcttcagactttatatcgtcgttggaagactttcttcatctgcattggtcttcgtttcttcatcgctggacttggcactattgcaccaccgtcctcagatttgatgtcatcttcgttgggcacttagatcatccagttgctttattcgacgacatcgtactaagcatcgtcatctttcttcgggtcatgaccgtcgtgggaagacttaggctcatcgttttctttatcatcaagaacggaccatcgtctttatgcttttactttgatttccggcatggaatttatatgtactccttatcattagtatgaggatcggagctaccatcgtcatcgttgggcatgaaatatgagaaagcaacgaattttcgtaaactttatatcatcggaaagcattttaaaacatctatctaataaatataaatatgactatcaaattttacatattttttataataatattaatgtatgaagtactagttaagtcgtttaattaggcacggagggagtataaaatatgaagtactagacttagaaataagaagtatcggttcttggagaagtactcttcagtacttgctgggtccttggcacgcctccataaaagtaaaacaaagaatcgtcctgatagatgatctggtacttcaaactgcttcttgtgttttgcgcaaccctacggttacatcgttgcagcgatattgaactgctatgctgcaaggagcggtcatttttgcttaagcttgagctgctaccacaagctaaactttggcactccgtcgaaatctttaccacgagctgagggttggggatgtatcaagtttccgactggagcagtcatcgggtgaacatgggcaccagatgaaccgagcttctgcggtcttcgtcgtcgacatcgttcttggcgtcattatctagtatgggggttcatcatcttcggactttggcatgtcgtcgcaaagttttggctcatggactttagctcttcttcgtcatcgggactggaccatcgttgctgaagttgtgcttggtgatgctttggtcatttgcaccggaagttgttcatcgttacgggcatcacaccgttgtacagacatgtcaccactgtacgtcgggttagattggtacttcagacgagcttttgagcttgaactgttgctcctctcctccgagtgagttggtctgcatcttatcacgtcatggcaaccacaacggtggtatacagccctcctctgaatgagtccttaaaacaaataaaagaaaagaccagtagaaagtaaaatggtagagatcacggtaatctagaaatggttttaaagtgtttcagctgttggctattagtggagttccgatcacataactcatttttgatcattttgacaaacagttttaaaagctagcttaagagcaaaatggttcgaatcttgatttaaaatgaaaactaatcaagaagaggttacgaacctcataaactggttaagttattagccccataaaaacccatttgatgaaaataagaaaattcgtagattacaatggaaaggaatcaagctactgttggctcaaatcgattacacagatcactaaaggaaagtccgcataaacattttaacaaaccagttacaggccagtttttacaaactcagtccaaggcatgaactgtggggaagacaaagctaccggtggcagggttaaaaatcaaagagaggctatgctcgtctcaaaatgaaagcaacaggagtttggataaaatgataaggccaaacaatactaggttagagaccaacaccactagcagaaacaaatccaaagattgggtagcgatcgaatctaaacttgacggttccattttctccaacaggtccaaggtatgttaaaaacttgaatacaaagctggtttatcattagaaaacaaatctgaaaagtctgtaaatcattaatctaaataaacatcagctggagactgtttttggataaaatatataaaaccaggaaaatgaaggcgaagatccccttctgggtcttttagagactcaggaaaatgtggggtttcatccaaatatataaaaccaatttcagaaagcttcatttccgagaatagtaaatgaagcaaacccattactgaatccttttcaagaacagtagattgaaattttataaaattgaaaccaaatttagaaataaaagcttgaaaggtaatagatcaggaactggtagaataaattctttacccgctccatgtttctagagtcaaattgtgactaccatttttctagtagcacaatcatatgaacaagatcctgggatcttgatataaaccataaaacagtaaatgaaagatgcaatataagcaagtaaataacaagagatttacacaaagataatttacgtggttcgatatcggaatgtctacatccatgggaaggtaaaagaaagttttattatggttttgatctgttacaaggttgatgaactctattaatgatgatgaagttcaatgagagttcttagtaatgaaggtattacgaagatagaaccaaggtcgtaatactacccagctatcattcctctctttagaggtagtgggtttcttactctcccaaaatccgtcccctcttttcaccttatctttcctgctttataggaaaagagacactaatttattacgaaaatgacatctgcttagattctaagctaactcggaattgattcggtgtgtggcgttgtgtgcttgtatacagctgcggcttctaatcatcctttacgtgtccaaatattttatggtgtatacaagaataggacaactaaaaggaaaacaataatagggaaaatacaaacatcggattctaaattgtcatcaaaatcatccttgtatggatcaacggtgtctccttgtgcaaaagtatataataataataataataataataataataataataataataataataataataatagtagtagctgtgcgaagttgatggagttgaaccatggggtgtcaaggttgatgataaacttcttcaccatgatttcttggttatcgtatctttcaaaattgttgttgattactactacgaaagatggtagaagatactgaagttaaaactaaaaacgcgtccaagttctgaccaaagttcgaggactcgttttccacgcttcgtatatatttgtattagaacaatttcctatactaaccagatttcttgaaatatatatatttgtattagaccaatttcttatactaaccagatttcttaaaatatatcagattcaagtagatagatggttgtagatcaagatgaaatcttaaaaaacattgaataaccgtcaatccacttatatttgatggtggaaaagtgattaaactaaattctattaaagcacatataaggatatcattgtgtaactcgatcagaaaggttgatatcgacgtatttacttaaacagttccacattttctcttatatcaagaataggggtgagatataggagaaaacttaaaagaaatatctatgccttggaagagtttcttacaaatactgagaagagaacacagaagaagggcccatttaagcatagccatgtcacaatcccaaatttgggatcatactaaagattctagtcacgactcaagaagaagctaaatagaggcataaaagaagctcttcaggaagaatgcagactgtagcttggcagtactttgtgtgtttaagttggcaattaaaaacataaaataagtagatttagatgtcatgcggtacacgcacgccgatagatatatttgtaatttaattaacatcaagatgcttgttttcgtgatcgcacaaattgattatattgtgatcctttgaacaaaactgatcccataaagaaaaacgtgacattttagagacacttgcagcaaatgaatcaatcatatcaattgttacactactcaaaagctataaatttagcacatgttttgttctttttgtttgtactactcgatgtattcattatttacttaattgcacatccaaattttttgtaatagcaagaagagatgtaagatatgggagaaaacttaaaaaaaatatattaatgcctcaaaagttggaagagtttcttgtgattactgagggcacacaagaagggcccattcaaatatggaattctgttgggccttcgctcattacacttgaaccaaataagaccataagaaggaatatctggtatgagtaaaactgcaaatgattattatggcttgcgtatggcagtagtagtatcattaacagagaaagtggcttttacttaaagtgggaaacaccatagagtaattggataagtaataagaaatttattttataataaatgagttgaatctcggtaagaatgtttgtgatcttggttggcgctcacaagctttatgcaagaactcccaaaaaaccgtggtgccattggagctaaccatctattcgataaggaagtcactaaactcttctattaatacttcctgcaccaccactaccaccgtgaacacggtgactactcccacctgaaactggcggaaaattaaatgatttctgccttaaaatatcttttctcacgtcatctggtaaccgtaatgtaaacctctcactattctttaggtctcgtggtatcggtatcgatgaatgcccagttgaatgtgatcttggatatttccctataggcccgtttgtggatcttagtgtactttcaccagcgtttaacaggttcttctcattgtcagggttgataccattaatcacttgttctgaattctgtaccaaaggaattgaaacccaggtctccccatgctctgtttcagaatgcaccgtcgcttcagaatggttttcctcgtcttcttcgtacacatcaactatagcatcacctgcactaatagcacttccggcgaccatagttttaaggtcacggcaacagtaaggacaagtcgaattcgaaacaaaccaagtaccaatacattcaggatgaaaaacatgatgacagggtagcaatcttaacttatccttatccccaaattcacttaaacaaacaggacattctaggattgctcctttaatattatgaaccttgttgacattcttaacatcagagtagacaaacaccggaaaggtttcgatgactgcagaatcaagacctcctatacttggtgtttctgtaggaacaacagctgggtcaccggcctggatattattacgtatttttctttgctcatgaatacacgatatgatcataaacacagtaaaagcaattaaaaaataaaaaaggggtgtattatcttggcgtggcttatcagtgtcgctttgtgcagaagtgtagggaagtattagtaccagaagtaggaatactgagttgatggagttgctacccgcagagatggtaaggttgatattcttcttgaccatgatttttcttagtttttgtgtcttccaaaatattgttgttgatttattgtcgttgattaatatgatttctcttctttatataattgtggaagaagaaatttgggggaaaaaaaaagggaaccgagagaaattaagaaacacgtctaaccctaagttccttccgcggattgctgactcttgtttctcaggctacgacgtataaatttccttccgtataaacacagtttcctaacctaaccagattttcctaaactatgcatatatccttaatatttcacccgaataattacttaatttgctgggggtcacttgctgccttgctggactgacgtcgtgagcctagaattggggctcattttgggttataagtttggccaccggcccattttgagacactaagcaactttgagaagaacaattttttggggaccatggtttttttttgggaccatggttttattttgggtaaagacattagaagtaaatctaggtcaccccttatctagatatttatattaatacctaaattaccctcctgattaattttgggtggtgattagttagtcttaataatagttagtgtaatgattagtgagatgattaagttaaagataatttatgagattaaaaaatcagatgttttttttttaaagaagtagaattattgagagagtaaagttagagaagatgaagaaggaaaacataaaaaacgatggattttaccaaccacaaccggaggaagggtatttggatacccaggtatgcgtcaaacttagataatgttggttgaattgctccaaactttcaaaaaaaatgaaattttttatgtatatttgggccagtttagttaccatatgtcaagaacatgtaaacggacacacctgaaagtgtatttcggttacgttttccaaacacgcaggttaccgaactcgctcgttaatggaggttttggttgtacagtgtaatgttcggttacctaggataaaatggtaggttaccgaactttgaacttatatttgggtacatcttgtgtgttcggttagttcgcaaacttcaacacaaccaagttcccaaccgaactgcaggttaaaagtaacctagtgttagaagttcggttggttcgcaaacttcaacatattttgcgaatcaaccgaactgggtttatatatacatatatccaattaggcaaacgttcggttactacgaaatttatttcttggcgaataaggtagagttcggttacgaagtttcaaaggtagagttcggttacaaagaaaacttaacatttatgcgaacgaaccgaacttgtggacttctcattattttcgtaaactaaagttcggtgatatccttattttgcgaaggaacagaacttatggacttgtgtttttctaatacaaggagttcggttaaaagtattttttttgcgaatcaaccgaactctgagttcggttaagaaaaaaattaattcgtgataaacgaacttttctctgaaaaataaaaaccctccattaaacctctctgcaacttccagtttcaactcattttaattattacttctcatttattcaaccaaaaatgaatgataagtaatgggtttgtgagaatatctttgttaatgttttaaattaagctatatatatatatagcggtggtggtaatcggaggtggtggtggtaatcggtggttggtggtggtgataatcggaggtggtcgtggtggtaatcggcggtggtgggcggtggtattggtggtaatcggtggttggtggtggtgataatcggaggtggtggtggtggtggtggtggtaatcggcgatggtgggaggtggtgggaggaggtggtggttatatatatacaggtggttattgggttggttttaaattaaattaggttaaggttaggttagtcatttcaatgctttaggacaccccttataactatagggaaggtggcctaataaaaacatggtctcctcaaataaaccatggtccataaaaaatcgttctttgagaatctaggtgaatttcactcaaagcacaaattttggatggggggtcggtttttgatcaaaatgttgttcgagtcttactaactggatagtcaaatgggatttttatagatttcataaatttgttatttgagtgaattctagatatcatatggaaaactagatatttccgatgattttctgagagtaatataggatccttgtgacttcaagatacaaatctggtaatttataaagaatcctgtgatttctagtgacgaaaaatattctcacattgttttactatgctccttaaaatgttaataaaaactatgtactatgaagatagtaattaaaatatgtgtttattgtcaaaataaatctcgttgttgtcatatgcctaattaagcgataagcttgctccaaaagttgctgccagaaaacttggtgcatggagggaaaagaaaaagagagaggtggagttgctgagaagaaaaagtaatttgaattatatagtacctactaatgtattactgtacaaatggtttgtttcttggttatcaattcaaacaaataaagagaaaagaatttggtttttttctcaaaaaaaaaaaagaaagtgtttgccttttggggagaaatctctatcatgcctaattttctaaaaaggtctcggtaaatctttaaaaacaacaaatcagtaatttcaagttctcattccaataacaatagtgtttgagtaattcttataaaatcctaatccattaatatggagtttgagagaattaaatgacttatctctagccactaacaagtgatagtaagagactctcctgacaatgtatgtggaaactaaaaatgtccttagaaatttcatttgtctaccccttgtaagattttaggtcacattctatcgtgtatttaagtgaaaattaagatacaagaaaagataattttgcggacaaataacacatgattaaatgtatttgtatagtttttctaagaacaaagttgtctctcttcggtggttgaattagttggaaacccgactaattcgcaccgatataattcaatgtaaatgcatcttaaggtacttatgagcgtatagaggaatctgcttcataacttattgttggaaaaagataagttgtgcactattttggaaggatcagtggttgtatgggaaatctttgtagtctttctttcctagtgtatacaagataagtcgaaggcaggatgttatcaataatgatttggtgaacataaacagtggtgatagaaattggaacctggctttttgcggacttaattctaaaagaagaaggaattgcggaggtcgcatatctcatagatttgatttcaactttcaactttagaaatggtggtgaagatcaaagaatttggcagtaaggaaggactgtgttctctgcttgcagaatgttataaggctatggagatggacattttgttgctctttccacatgaaagcttatagaacccaaaaatcccccaaaaggtattttttttcgactctatgttacagtgcagaccctaccttggatacctatcagaattcttttatggtgaatggatcgatgtttactttccaagaaagcagcagagtcaaatcagcatttatctttgcattgaggaataactaggaatgtgtagctttattttctgaattgttatgtattgcaaggggtttttcaaggttcggtcagagataaatcatatttatctctgtatcatattcccgtagatacagtatgggaatggaagagaagaaaaacgaaaaactcgagtattagaaatcatatttgggatatcattcctttcgcgatatggtgggttttgtggatagaaaaaatgagaggattttcaatgggcgttacaaaactttagaggaaattctcaatatagtaaaggtttttatatataactggtgtttaggaacaaaattctttcacgaaattcatctgaattctttattgtacaactgggaagcagtaatgcactaattaggcttccagtatcttttgttgagttttggttcttttataagctctgttataattgagcttgtgtttcttgtattttcttctgtctgcttaccgtctcggtgaggagttttgactttttaatctattttttcctttgccagtcaaataaaaaagataagttgtgtgatctattgaaaggaaatgatctaacaataagatattctagtagaaaaggaactgataaaccaacctaaataaagctataaatttcgttcttttttatttttatatttttgcactagctacttgcattgaactagagtactatgatattctcttttttcctttttttttcttactcatagtataattgtataaatatcagcgtaagctcgtagagaagtatagtgctgatgtcaatttattacatttgtgatttattttggataccaagattattttgagaaatttgagaaaacttaaaaaagatgatacccgtgaaattagttgagtttttcataatcgctttgagcacacagagaagtgtatattttagtgggacatataatatcgaagaaagtgaattttttctaacgtttcttgactttctgccttgagtatcgtcatatctttaacaatttttgtggaaagtacaaagaatcgtgttacaagtgtgaaccgaaaatcttggagtcatgattggggtgataaaacacttgaccgtatatggagatatttggaaagtctaattcgatatataagattcaagcttatttttgggcggagtcaaacactaaaatgttgggtttaacggagaacatggtgacagttttatgggactcatatttctatcagccgttttgagttggatttgagattttgggtggatgttttctttaatttttcttggctctttttttctttatcctcttttttgggtgatcgattcctaattcggtctcccaaaatatctttgttgattaatatgatttctcttatttatataattgtggaagaagaaattggagaaaaaaaaaataaaaaaaaaaacaaaaaaaaaacgagacagatacacgtctaaccctaagttccttacgcggaggttgaagaaatgccgactcctgtgtctcaggcttcgactaatatttcacccaaatgaaataactacttaatttgctggggcccagtagcagccttgctggactttcgtcgtgggcctagaattgggactcattttgggttataagtttggccaccggcccattttgagacactaagcaactttgagaagaaggattttttggggaccatggtttttttgggaaccatggttttattttgggtaaaaccattaaaagtaaatctaggtcaccccttatctagatatttatattaatacctaaattaccctcctgattaattttgggtgatgattagttagtgttaataatagttagtgtaatgattagtgagatgattaagttaaatataattagtgagattaaaaaatcagctggttttttttttaaagaagtagaattattgagagaataaagttagagaagatgaagaaggaaaacataaaaaacgatggattttaccaaccacaaccggaggaagggtatttgggtacccaggtatgcttcaaacttagataatgttggttgaattgctccaaactttcaaaagaaatgaattttttatgtagatttgggccagtttagttaccatatgtcagaacatgtaaacgaacacacctgaaagtgtagttcggttacgttttccaaacacgcaggttaccgaactcgctcgttaatggaggttttggtcttacagtgtaatgttcggttacctaggataaaatggcaggtaaccgaactttgaacttaacaatttatttgggtacatcttgtgtgttcggttagttcgcaaacttcaacgcaaccaagttcccaacagaactgcaggttaaaagtaacctagtgttagaagttcgattggttcgcaaacttcaacatattttacgaatcaaccgaactgggcttatatttgcatatatgcaattagtcgaacatacggctactacgagatttatttcttggtaaattaggtagagtttggttacaaattttcaaaggtagagttcggttacaaagaaaacttaacattttgcgaacgaaccgaacttgtggacttctcattatttttgtaaactaaagttcggtgatatccttattttacgaaggaaccgaacttatgcacttgtgttgttctaatacaagaagttcggttaaaagtatttttttttttttgcgaatcaacgaactctgagttcggttaagaaaaaattaattcttgataaccgaacttttctctgaaaaaaaaacctccattaaacctctttgcaacttccattttcaactcattttaatgattacttctcatttattcaaccaaaaacgaatgacaagtaatggatttgtgagaatatctttgttaatgttttaaattaagatatatatatatatatatatatatatatatataatggtggtggtggttggtggtggtggtaatcggtggttggtggtggtgatcggcggtggtgggcggtggtggtggtaatcggtggttggtggtggtaataatcggaggtgatggtgggaggaggtggtgcttatatatatatatatatatatataggttgttattgggttggttttaaattaaattaggttaagagtaggttagtcatttcaatgctttaggacaccccttataactatatggaaggtggcctaataaaatcatggtcccctcaaaataaccatggtccctaaaaaatggttcttgagaaactaagtaaatttcactcaaaacacaaattttgggtcagggggtcggttttggctcacaatgttgtttcgagtcttactaactggatagtcaattgggattttatggatttcgtagattttttattttgagtgacttccagatatcatatggaaaactagagttttctgatgattttatgagagtattataggagccttgtgattgcaagatacaaatccgataatttataaagggtcgaatgatttttaacacgtccaaatcttccgactttgttttactatgcacgttaaaaagttaataaaatactatatattatgaatacttagaaacaaaaatatgtgtttgttgtcaacataaatctcgttgttatcatatgcttaagcgataagcttgctctgaaagttgctacgagaaaactcggtacatggtggaaaaatgaaaatagagaggtggagttgcagagaagaaaaagtaatttgaattatatagtagctaatagtgtattactgtacaaatggtttgttccctggtcatcaattcaaaaaaataaagagaaaagaatttggttttatttaaaaaagaaatgttcaccttttcgggagaaatctctatcatgcctatttttctaaaaaggtctctgtaaatctttaaaaacaacaaataagtaacttcaagttctcattcgaataacaatggtatttgagtaattcttataaaatcctaatccaataacatggagtttgagagaatttaaatgacttatgaaaattctctaaccactaatgagggacattaagagactctcctaaaaatatatgtggacatcaaactctctgaaagtccatagaaatttcatttgtctaccccttgaaggattctagatcacattctgtcgtgtatttaagtggaaattaagatacaagaaaagacaattttgtggatgaatgatacatgattaaatagatttttatagattttctaagaacaaagttgtgtctcttcgttgactgatttagttggaaacccgactaattcacaccgatacaattcaatgtaaatgaaacttaaggtacttatgagcatatagaggaacctgcctcataatttattgttggaaaaacataagttgtgtactattttggaaggataagtcgaatgcacgatgctaccattattgatttggtaaaaataaacagtagtgatagaaattggaacctacatgttttctacaaacctctaaaagaagaagaaattgcggaggttgcatatctcctaaatgatttcaactttcaactttggaaatgtagtgaagatcaaaaaatggcagcagggaaagagtgtgttctctgttgctgaatgttataaggctacggagatggaatggacggtttgctgctctttccacatgcaatcttatggaacttaaaaatcccccaaaaggtataatttttttcatgagcactctatgctacagtgcaccccctactttggatacctatcgggattcttttatggtgaatggatgtttactttgcaagaaagcagcggagtcaaatcagcacttatttttgcattgagaaacaactaggaatttgtggctttattctttgatttgttacggaattcaatgggtttttcaaggttcagtcagagatagcgtatgggaatgaaagggaagaaaaactacaaactcgagtattagaaatcacatttgggacatcattcctttcgcgatatggcgagatgtgtgaatagaaagaaatgagaggcattttatatataactggagtttaggaacaaaaatctttcacgaaatccatctgaattctttattgtacaactgggaagcagtaatgcactaattaggcttccattttcttttgctgagttttggtttttttatgagctctgctataatatagcttgtgtttcttgtattttcttttgtctgctctttaccatcttggtgaggagttttgaattttttaatctattttaccctttgcgagtcaagtaaaaaagataagttgtgtgatccattgaaatgaaatgatccaacaataagcatgtaacgtttaagatatcctcacaacaaaggaactgataaaccaacctaaataaagctataaatttcgctcttttttctttttatatttttgcactacttggattaaaatagagtactatgatattacgtttttccttttttcccttactcatagtataattgtataaatatcactgttagcccgtagagaagtctagtgctaatgtcggtttattttggatactaagattgttttgagaaattggagaaaactttaaaaagataatacacatgaaatcagttgagtttttcataattgcattgagcacatagaggaaatggatattttagtgtgacatataataatgaagaaagagaatttttctaacgtttcttgattttttgccttgagtatcgtcgtatctttaacaatttggaaagtagaaaaagtcatattacaagtgtgaactggaaatctctgattgttaaaggtattacagtctagcttattaattcaattattgttgaaaatcaagctcaaacctttaaaaatgatgtgattctattttagatctaatatttcttggaggatttcacgaaacttttcagccatagaatcataacgaccagatgaagcttatcaaaaaaaaaaacactcagacacttaactgaatctataatagaggtagataaatttgtatacgtctatgtttctagctgcgaaatgtagttgcacaaaattgacaattaacacccaaaaagatctaaaggttgtgaataatataacatcgaaggtatccgcaaattacaataaacaaagtgcataaaatatatggaaatacgaatagttaacgtggtggtttgtctatttgaaggcctacctccacgggaattaaaatattatttattgtttcggttacgaagtcttatgactcttattcattaggcttttaaggcctcttttggtgtttttcttctaccttcttatcttgcatttgtcttcagtgatgtattcatgtggcgatcaaatattttacactcacaaaaatttaaagtcaagagaggtagattttggtccacactgtgtagtttaacatggaaacccgatttccaatggaataaaaatgaaaggacttatgggcatgtagaggaaactctctcatgattttttgtagcaatcatatgaatcgcatgatctactaataaacatgtaaactttaaaatatgctcatatcaaatgaatccaatatattattctgctgtataaagttataaatttccctcttctaatttatttcttttattttccacttctttgattaaactagactcagtcaaagcatatgtgtaaatattattgttaactggatcagaggtctaatattgatgcctttacataattacatttcctattcctttgtgataacaagaagagttttgagatataggagaaaacttaaaagaaatgctaccagtgaaattggaagaattatgttacaagggattacttgaaatggttggttttgcagtctcgtgtatctataacgttaccagaagcctattctatgtttataacaatgttcctccgaaacaattcaaaaagtattttagtgtcatccaaattgatggagttgcacctaggatggtaaggtttacttttcgtgtctttcagaattgttgattactactgtatgtttgggttggttatatataaatgtgaaacaagaaattggagtactgaaaaaagaaaactgtgaaggttcaagggaagccgaatcttgttttccaggtttcgtatataaatgtctgggatggtctaaaactgtgtagtcactgaatttgctgaggtcacttgctggacttgcctcgtgagaaatttgggctcagtttaggagatgaggtgatgtttgggccaccggcccattatgagtcgttaaccaactttcgagttacgcaaattttaacccattgcacgaatttttccattttgtctagtattgggtccaaatgttgtcttgagtcttaaattttgtggtataacgtaaattttgggccacatacctattttgtctaatttacggggtaaattttagtcatgtacataggagcaaggttattgcatgatttatatgggctgataccggtattaatagggattgatatcatttatccgacccaatagtcgggatcgtttaagatctttttgtccgacacgaaatggtatcagccctgtcgagagagttacaatcgtttgacaatctctcttaacctgatttcactccattcttctctatcgaaatacagacacgggactagatatttattacacctaatgattaccggctactttattggtcggtggatccaccaacacataaccgacacctcacacatgcacacatgtgaattacacagacacaaacaattgaccagaattagccaatactctaaccccccaagaccagtgtctatggaagcagagacaccgaggctgagtctcaaagtatcaaaggcctaagtggataaaccctttgtaaagatgtctgcaatttggtcctgagttgataaaaatctggcatccaaagctctagcagcaactagttcacgaacaaagtgaaaggcaatctcaatatgtttcatgcggttatgaaatatagggttagctgtcagataagtggcacttatgttatcacaccatagaactggaatccttggtgagtgaaagaacaattcaaccataagagattgtacccaaattaactcagaagttgcatctgccagtgctctatattctgcctctgtgctagatttggaaacagtcttttgctttctagaacaccaggaaatcaaattaggacccatgtagatagccatcccactggtagagcgtctatctgtcaagtcaccagcccaatcagcatctgaataagcctatagttgagatgacgaccttttgaattgtaaaccaaaagaaagtgtgtcatttagatatctcagaatgcgcttgacagcagtccaatctgcttcagaaggattttgcatagtctgacaagctttattgactgcaaatgagatatatggtctagtaatagtggcatattgcagagctcctactgtacttctataaagaagaggatcatcaaaaacaggtgattgagaagtatgtgaagcatatggggtactgcaaggttgagctgatttcattttggttttaaccaaaagattagtaatatattgctcttgagataagataacacctgcagaatttgatgtagcctgaatgcccagaaaaaatgaagaggtcctagatcttttatagcaaactccttacccaaatcaagaatgagttgattgacagctaaaggattactgcctgtgaccaaaatgtcatccacatagatgagagcagttaccttgtaaaataaagaagtgtcagtttttgatgcagaaaatcaagatttaaataagaattggctgagtctatcaaaccaagctctgggtgcttgctttgatccatatagagtcctcttgagcttccacacatgattaggcattagcttatcaatataccctagaggttgaaccataaaaacatcctctgccaaatgaccatgaagaaaagtatttttaacatccaactgcctaatttgccatcctttaaagagtgagatagataaaataattctcactgtggtaggtttaaccacagggctgaaggtgtcttgataatcaattccttcaatttgattatacccttttgcaactaatgttgcattatatatttctatgctaccatctgtatttctctttattctaaaaatccacttgcagccaattatattttgtccacccatagcttgtactagtttccatgtgccattttgtagaagtgcattaatctcttcatccatggcagctctctatctgggatccttgcaagcttcagtgtagcatgtaggaacactaatgtcttcacaaacagtttgtacttctgaagcatacactttaggtttaaaaattcctttcttacctttggtggtcatggaatggtcattgatagtagggactgaagaagtggatgatgacacagatgtgtgatttgataaagaggcaatggtagtaagtaaagtagtggatgtatcagatatacaagtgttatcaacatcattggaaattggagttggtgaaactgacattgttgacaaagatgggtttttagattgcatagtgtgcataagagttgcatagggaaaaacatgctcatcaaacttgacatctcttgagataataattttattattcattggattgaggcatctatatcctttgtgtaaggtgttgtagcctagaaaaattcacttgacagagctaggttgaagtttgtgatcattaaatggtctaagacaaggatagcaagcacaaccaaagatgtgtagaaaattgtaatcaggtttaagatgaaacaaatgttcaagaggagataaatgtttcaaagttggtgtgggcagtctattgataagaaagttggatgtttcaaaggcatataaccaataagataatggtaaagaggcatgggaaaggagagccaaaccagtttcaactatatgcttgtgttttctctccgcggtaccattttgtgcatgagcatgtggacatgagactctgtgaccaataccacaaatatacaagtatgtagagacatttttgtattcacctccccaatctgattgaacaaacttaattcttcttgaaaaaatattttcaacatgactcttaaagttgataaatgtagataactcctcagatttgtaagccaatggatatatccatgtaaatctactaaaagcatcaataaaggaaacatagtatttgaatccattgatagaacatataggtgatacccaaacatctgtatgaatgagatctaaaggaccatataatggttcatgattaacagaaggaaaaggtaatgcatgacttttagcttgttgacaagaagtacatattgaggttgataagtggtcatcaataactccatcaacagaagaaaaaatatgcttcaaggtcttgtatgcaggatgtcctaatttattgtgccattgagtagttgtagaagtaccagaagtaaaggcttgtttgagagaagcagctgagaattccaaatgatagagtccatctctaacatgaccagtgagcagaatgtgatgggtatccaaagccttcaccaaaaatttatcatgatgaaattgaaaagaacagttattctccttagtaaactgttgtactgaaatcaagttcttagtaattgaaggaacatgcaggacattagatagagtaaatttagcagtgtcattctgaaaagaataagtgccaatatgagttatgtgcaaacattagccattaccaacacgcacttgatctgacccttgataaggagaatgcagatttaagttggagagattagaagtaatgtggtgtgtagcaccagaatcagggacccacccagatgaagaagcagtattatcattagtgtaagtggcatatgcttcaggttcagggcaccagaaatcatcatggtcttcatagtaaggatcattagtcgtatagtatgcatatggcattgaattatcagatgaaacatatctatatcgacaaatggtggctaagtgtcctggtttcctacatatttgaaaatcagtttgaggattgaactgcctatttagtgagtagtaaaattgattttcattgttgaatcgaccagatcatccaccattatcagatctgccacctctataaccaccacgaaaatgatcaccatgtgtaccacctctatacatatttgctctaggaggagaatctttataaccataggaagaccaatttgaattggtagaagggtgaaaatttgaattacctgaataatgtgaattggtgccagaagtaggagtgttaaaactctgattattgtgtgcatacgagtgatgtggattatgttgattttgttgttgtggttgcaaaacatttgcagaagcagtagtaagatcaaatttagattcatcaattacacgcacttcctcagataaaagtaaaccaagtagctcagatgaggtgataagattctcgttctttaattgttgtgtaatgatggatgtcttaaacgaattgaattcagaaggtagaccttgtaataaatgaaacaccagatcttaatcagagactggtcgatttatttgagttaattgatgggaaatagatttagctttgttgaagtacaccaacattgaatcggagcctttattcatcgttacaagatctgatttcaatttcattaaccttgattttgtagtagcagtatagttatgttgaagacgaatccacacttcatgagagaaagtacaatcgagaacctgagaatgagtttcttcagcacaagcagaaaacaaccaggataaaagatcttgatcttgattattccagtgagtgtagacaggattgcgaacaaattctaatgcgggatctgatccttcaacataatcatatcgaataatagatgttgctccatcagcagaattcctgcgaaaatacttcgtcggacattgataagatccatcgacgaatcggaagagattatagctcttgagtaatggtacaatctgagatttccatagtgtataattcgtatttgtcaatttggacggtggtttgaatgttaatgcaatgtgttttttatttctggcattgataaaatggttgaaggaaatacagattgataagaggaaagattgattgattgaaaaagagatgaagaaattagtgtttacggtgtctgataccatgttgagagagttacagtggtttgacaatctcttagcttgatttcatttcattgttctctatcaaaatacagacacaagactagatatttatttacagctaatgattaccgcctactgcattggtcggtggatccaccaacacataaccgacacctcagacatgcacacatgtgaattacacagacacaaacaattgaccagaataagccaatactctaacaagcccatatcaatcatgggttattctgtcgcaaaacttatgagcaatctgcctcctgatttattgttggaaaactatgaattgcgtgatccagtgaaataagataatctcatagtaagcacttaacgttcaaggtaagctcatatgaaatgaactgatcattgaaattgattcatggaaaatcatcctacagaaagttataaatttcgttgttctttgtttttgatttttttgcattgctcggattaaactagactaagttagagcatatatatgagtaaattaacttcattatcaactccatcagaagtatggtataatcttgttacattattacatttccaatttttttgtggtcgcaaggatgttttgggacataggagaaaacttaaaacaaatataatgctctagaaatttgaagattttttattataattttccgatttaatgtgcgaccgctttaggctcctagtcgggacctttatataatgttatggcatccaactcaaaaccaattggtaatgagtggagaggccccttattaagattataaacagcaggatcttagatgcccaaacaacgtgggactaataatctgaacacgccccctcacgtgtagcctcgttgagtctaacacgtggacaattaattcgggtgacgcggagtaaaggcgcggtcaatgactcgtcgtgaatatcctgctctgataccatgttagaatatgggcatccaactcagaactaattggaaatgagtggagaggcccttaggattataaactgcaggatcttagatgcccaaacaatgtgggactaataatctcaacatataaacatggaaaaagtgttattcgaataattgtgtatttctcttagtttgttcaatgtgtgatagagtatcttttgcaactgaaatgaaaaatgatttttaatttaggcatctgtattattatagtgtagattttcgcttaatgttgcaagtttacacagtatattctgcaaacaattctttcgtataaatagctcaactaattagttgagctgtttggaacaaaagaatatgaaaatttggaatgaatcaaaattttggttaattcgttattattttgttacttcttggaaacattagcggatgacccaaaagaaaatcacaaagatatgtttagtgatatggtgaagtatcatcagggcttaaacatagaggagatggatgaacatcttacctaattatctcttgcattcttatcctggttggcagcttttagtttgccgttttgtttcttagattcatcaagattttttctctattgttgtatttcttgatgttttttttatttttttattttaattgacattttattttagcttcttcgttctgtttatacttatgttaggttgtttgtaccgtcagtaaaatagacagacagatagttaatcaagcccttctagcccatgaaagaagattccaaaagattttaaaagtttcctgaagacttgttgcccaagttgcttgcacatgagatttttatcagaattagggttacataaataatataagtacaggtattttaaaccctaaggagatagaaaattctaggtttgataaccgaagaaaaaccaatgtatcaaatacatcaataaaatctctccctacgggattccattcttggatgtatatcgctcgccgaaccacgttaaatttttatctcaatttattatctttcatacgttttttagacctaattcatcatgatcatcaccaatcaatcgtgtttagtgtctagaagtaattttgggtacaaatataggtgtttgttgctttttgtaagatgtgagcgcacggctattacgtgccatttataatacatatccttttgactgatcaaacaaataactgagggaggttattggtcactttggatgcacctcaaaagcttcatcacccttttcaatatgctaagttttttccaatatgtgtctaccacatgaagccgattgacctcttgtagaggttgttaaacaacccttccactaagaagattcaattttgtatgagcaaaatcgactatatcattatctgttaatttaatcgtttcacaattctctattcttagttgtacctaagaatgaccagttgaatgtgaccttgaaaatttgtcgctaatgcctatcgatctggtagtactctgtctctggtccgggtttatctcttagttaaggcttatactaccaattacatcatcatatttctctaccacacaaattgaaacatggctccaatccttttattagggtaattatctttatattttatcttacttaaagtgtaacaggggtgtcagtttatatttacttcttatgtattaaggttttttgccttaatgagaacaaccggccccctctcttatcctttacaaaatcagtacaacttttttttttttacttatgctgaaactatgtcacggcatcaagagctagggagaaaaccctagttgtttttacgatccttcatcctagtcatatattcaaattaaatcctattgttttgggaagaacttatgtttgagtgattttcgttgttctttgtaaaaacattattttctttttaatataatgttttcttcgtaaaaatatccactgtccacagttaaatctataatgattatctaacctcactatagtttttgatcttatcatggctcatcgttactacttttcaagggactaatcatctatgtcttccgcttgtaaagccccctaattattacttccgtcaagttttatccaaaacccccaattatttctcattctagaaattttcaacactacttttagaatataaggtgtaaacctcctaacagaagtatgccttatattttagaaaaatatcctcctaacagactataagacacaaaatctgacagaagtattgtttacacacgtttttgataacggtgttataaacggccagttaaatataaggtgtaaacagactgtaatccaaattttaatgctccaactaataaagtcttgccacttgttctctccagaattgttcaaactcaccctgcaacgtgggagcttaaatgacttagtgttataaaggaggagagactagataaccttaatttattgttccaggggtaggtgattgtgtcccctgatttgagtacgaaaaatatttatatattcggaggtaaaatatctcttggtaaggtaaacattgtaaattcatcctctttatatccaagaataaggcttgtatgcaacaggcatactaacggcaatcaaaaactggttgcgggtacaaaaacacgaaaatatatttgagagcaattcaatgcttcatcatcagtatcaaccatgaaactatataccagaagaattcctcgcacaaaaacgtggtgcctttggagctaaccatctatctgattgggaagtcattaactcttccatctatattactactttctgcaccaccagtaccactgcaaccgcaatgactactcccacatgaaacgcatcgacaattcaatgatctccaccttaatatatcttttctcacatcatccggtaatcgtaatatatacctctcgttgttctcttggcgttgaagtatcaatgaatgcccagttgaatgtgatctttgatatttcctaggccggttaatggatgttagcgtattctcactagcatttaaatggtttgtctcgttttcagggtttataccatcaatcacttgttccgaatcctgtgcagaaggaattgattattgatacacgggtgtcctcatgttctgtttcagaagcggcggtcccttccaaatggttttcattgtcttcatatacatcaattacagcatcacctccactcatagcagttccggtgaccaaacttttaaggtcgcgtctacaaattggacaagtggaatgagaaacaaactaatgatcggtacattgaggatgaaaaaacatggttgcactcaccctgccttgagaagtccttagttaattatttcacataggagagagagtcagtgaggatcgggcgattaaaccggtattgactcagtgagaatcttagtaaaaacttcggctctgttttgggttcttcttctccatttcgagtgatgtatatcatttctgttgatatgtgtagatcctgtctgttgatatggagtcaaggtacttgaaaattgataataagaattttgagtttcaagtttgctgtagagattctaaacctccttttagaattatcgagaggtctaatgggtatgtcaatggatgtacaatatcttttgatagagtagaatgtcttattaactctattgcggatgacggagctggctttaaggctacacgttatcctttttggagaacatcactgggtaatggagcttctttactcattcttggtcgtgctaactcgaggggaagatatctttctcttgattggtttacaggaaacagaggtgaaaaggtccatcgtattttgattccagaaggaaagagtagctatgggtggagtaattttgttcttctattagaatactttagggataaatgtctccatccaatgcaaccaaattttcatccgaatcaaaagggaacttttaatcttctcaaagagtccggacttcagttattgctaacaaagacaaaccaacacactccaggtgaagtactctatttctccattagtagatgggattgatattaacttcaaaggacaagctagggatttcggaaagtgggttgatggcattatatgcaagctggatcaggaacctacagattggagaatggtggaggatcgaattaaagcctcttttcatactcatgataaaatcaaaatccatatttttggtcctgatgtgggaatcttctttacctcatcagcaagagagtatgatatgatcatcaatcagaagagtatagaattcctaagccgagaaattaaattcatgcagtggtggccatctgttaacgccgctaacccaattttatccgataaaatagcttggatttctcttgtaggggttccttttcacctttggtcaccatgaatcgttgaagatctactcatgaagtttggatcggttggagatatggatttcagtgatcttaaagggattaaagttaatctgaaagcttctctactgatcaaagatcttccgaggatggttgtattgaaggaagaaggactttcttttactgtttccttagttattccggtcattcaaccggagaaatcggtgggagatccaagagaccaagtcaacccgtgggaaaagaagacggaggcaccaccgttagatcagaatttgtcattcattaagggagcagatgaaggaaagattgtaataaatgctggaaacggacttgacagggatgggagggacaatggtaatgaggcatttatgaaaagtcacccttgcaacctgcgtcaagaaaaagcaaccagcatttttaatcaaaataaacgactcatccccaatccgaccgttgacaaaactttaaataatcgaaagaagaagaagaaaaagggtgggccatcatctgggctccggaacaagacagctgtggaagttttgaagggagataatcacaaattaaaaacagtttggaaacgtgtcataccctccaatgatatagacccaaaattttcggggtcagtgattagtgaatcccagcatgttgaaaagaacacccagttcctcaaatcgaccgaagctcaacaaaagttaaaacaagttgatccgttaatgttcccatttatcaacgaaccaatttctaaggaggttcaggtcgaggaaatcttgccgggaggtgagtgctttagtaggaatttagctatgccagaaaattcccacactagtgaaacaagatttgtgctgcagggtccagcttatactcctaatgaatagcgtgatgatagtgggatttttcaggattgtgaggataacccattggtgttgagacaggttaataataatgagaaatcttcgaatctatttccacaagttcagtcgaatcctgtttcatcaacttccggtacacaaggtgttcgtcaatattccacagagattgatgaagaattcagtgtgtgtcaggatatacatcagtcggcattggtgattagcacgacacaagactttgaaaacttgcttgtttgcattgatgttgtgcccattgcccaattggattcccatcatctcattactcgcctaatgaagaacatctctctaataacgaagacggcggggaagaagaagaatttttcgatgtggatcatgaggatggcagtaaagtaggggaatattgtattaccgccagggaaatgctcttggaacgtgaaaaggacaatctttttaagtcagtccgagcagtgggaagtctcatgggtcttctttgatagagcaagaagttgagatccacgagagcgttatgcagtccctaaaaagctttttaaatcggcctcataagatgcataaaggaaaagaaaattcctcaactgatgactgatgattccttggaaggggttaaactaatgattcaacaaggtgaataaagtgagcaggagtatttttacactgaagaggatgatgacactatcgaacacacggaagatgaagatgagatgggaagcgatccgatgggaggtatagaagagggctcgaacaagtatgaaagggaacgaagaaaactcaattgcagcatgattagttcagtcctaccatcgacaaaggaggaaagaaggaacaaagcaaagtcaagtaagttcaaatgacgaacaaaatcatatcttggaatataaaaggtttaggagatgatcacaagagggtttccataaattctgttttgaagaagtggaaacctgattttgttcttcttcaagagaccaaattggaagattttactcatcatattaggagggaagtatggagaaaatcggggattcaacattgctttcttccttccagaggtactaagggaggcatttgcattatgtgggatggatataagtttgagattttggacactttggtaggaatccactctctttcttgtctattcaaaaatctatcgaatcattctgttaactttatctcgtcagtatatgctccgaacgatagaaaggatcgaagagtattgtggcgggaacttggtgaagtgctaggtatttgggatgtgccaggctgtataggggggactggaatgtgacatgctctcgaagacaagaatagggatggtatcatcaccagacctatgcgtaacttcaacaggtttaaatccaactttgatcttgttgatattcctttaagtggtgcaaaatacacatggtcaaattttcaagaaaatacagtctgctctagaatagataggtttttattgaatcaaaagtgggatgagttttatcctggatctttgcaaaccgccaaacctagacctgtctcagaccacattccgattatgctctccacagattttactgacacaggtcctagacctcggaaatttgagacaatatggttggaacatgatgatattaaaagattggtacaggaatggtgggatagtttacattttacaggcaatccggggtttgttttctgtaagaagttgaaagggctcatggattacttgtccatatggaaaattgagacttgtaaaagtgagcaagacgatggataatctcctcatcgacatcaaaaatcttgacgcaatagaagatcaaggggttgcaacagaggaagacagaatcgtaagggtcaacaagaaaagggactacatcagatgggcaaacttagaagacaagaggatgaagagcaaaatgaaggaccactggattcatgagggagatagaaacactaccttttttcatttgtttgcaaatggaagaagaaggaagaacaacattggatgtctgagaatcaacgggtatctcatggaagataaaacagaaatttcctctcatctacaacaattctactcagatttatataaagaagacaatgttaatagaccttttatggagaatttggagttcacaacactagatggggaagaaagtgccatgatggaaggacctattactgaagacgagattaagattgcactaaaggagatggactccaaccggtctcctgggccataaggattcccagttgagttctacattcatttctcggagacaattaaagaagattatatggcaatggtaaaaaaaatcgatgagagaaatttcatagactggagagccaataacactttcgttgcacttattccgaaaagagacagtgtggaggatgtgaaagattttaggcccataagcctcataaacatttcctataaaatcattacccacgtgctgtctaacagattgaaaagagtcctccgaaagcttatttcggattagcaaacggtatttgtggcttacagacagattgtagacaacattctcatggcgaatgagtgcatggattcgagaacaaaagaagataaaccaggctggttatttaagttggatgtggaaaaagcatacgacaaggttagctgggtgttcttagaccgtgtgatgtagaaaatggggtttggaatcaaatggaggaggtggattcttacatgtgtttcaactccacacttcacaatattactcaacggtagtccgggcagtatgtttaaatgtacaagagggttacgacaaggcgaccctttgtctcatttctgtttacaatggtaatggaaggactgtgtcggatgatagataagttagagcaaaatggtctgtatgaaggtttcaaggttagtcaatatggaaagcaggtgacccatctgctcttcgccgacgacaccctgttcttctcaaacgactctccagatcaaatacaagtaattagagctacccttatctggtttcaattatgttcgggtttgggaatcaacccatctaaaagctctgcaatcagcattgggaacacttcttgtaatgagatagtaaatctaatcttgggttgctccatcgaagaactgccgatcaactaccttggtatgcctacagggggatcttatagaagcaaattcatatgggatattgtgattgaaaggaccaaaaatatactacaaggatggagctcgaagttcttaacttatggagggaggcgtgtacaaattcagaatgtgttgagttcaccggacatttacttgatgtcagtttattcaatgccaaaatcagtatcgaaaaagctaaatggggttttgagaaggtacttgtggaatagcacagactctaataaaaaatacccactggttgcgtggaacaaatgttgtcaaagcaaagagaggggagggcttgggattcaggatttgaacatcactaatgatgctctgctgtgcaagtagttgtggagataccaagaggaaccggaggaaaagtggagaactttaatcaaagaaaagcatggagaaagtaaactaaagtgggactccaaaattacaaagcagaagtacggcagcggaatttggcgaggggtcacaaagcgaatggatagtttttataaatgaatcattttcacagtgggtaaagggaatagaacaaggttttgggaagaccagtagttgggtgatatgcctttaaagatagcttttcccaatctttataatgtctctcggaagaagaacaatgttgtcagccaattttactttcgcgatcaggaagggaattcaaattggaatctggacttgcgaaggagattatcagatgttgagattgcagaggcgggggatctatcgcacaagttacaaaacgtgactttaaatgaagacgaagaccggagaaattggaagtggacagctgatggtgcatttacggtacgttcgtgctatttatctctacttcctccgtcctttttcgttgattttccccacaagattgtttggaataataatgtgccgaccaaaattagtttctttacgtggttggtccatcataattccttactaacacaagataatttagaaaggaaagggagaacgttggtaaatagatgttgtatgtgcaagaaggaattagagattataaatcacttgttccttcattgttcagtagctcactctatttgggatgtatttctaagtggttttggagtgggaagacctcaaggagatgacataaaggatgcttttaaagatagagataggactgatttcacaatgactgggaatttcatttggaacatcctaccttatgttatttgttggaacatctggaaagaacacaatcaacgaatgttcgtcacagaggcaaaagagaaagatgttcaaaaggtcgtactagacattaaggcaaatattttgtattggtctcatccctcaaaggctctccgcgacatcatatttaaaatgttagtcttcaaatgggaagagttaatcaggagatagtcgctttgttgttaaatctttcactttttcctgcacattattccattatggtcttgaggtattgtaactctttcattctttattcttttatataaaattatatagttttattgattaaaaaaaaacatggttgcatggtaataatcttaacatatctttatcagcaaattcacttaaacaaacagcacattctagtaccgttcctttgatattgtgaacctttttaaaatccttaacatgagagtagacaaataccggaaacgttttgatcaccgttgaaccaattccttctgtacttgatgtttctagaggaacatcatcagggtgatccgtgaccggggtattccttgctttatctcgctcgtaaaaaaacaatactattaaaagtataactagatttgtgcccgtgctacgcatcgggttttttattttatttggtgtgtgcagggcttagctccaccacgtagtgatgcatttttgattttgtacgcattgggctctccgccccgtggagatgtatatttgatttggtgtatttttggctatgcctttaagtcttttgattattcaattctttctcgttcttttccttcaatttatcggaacttctccaacaaaggaaattctaagctctttaaccttgtgtttcttacatacgctttttcatttctcttttagtatacaatacgacgactttgttcttttcttcgagtcccatagtcacttcctcacttaatgagcaacaaaaagtattcatatcacattaattgagacccaggtatttggagcaatatgaaatcaaaaaaatctcatcatgaacttaccttggttaacacatatcccttctttctgtaagaaactcttgagtgtactgattaccatttttctgaagtttcttctccaaatgatatccaatttcctgttaccatatgcatgcatctctaaattttggggcaaaaaagtgaaaggtggtgttcttgtttgttatgatgacaaaaacgtgaaaggtggtgctcctgagtctcctaagttcaacatgtaccacaaaagccatcatctacatcaaagtatgtataaatcactgggctaggtatttcctctctatatattcagtctgaaacacttaaaaatgtaaaattgcagagggcgtaaatattacctctatgttgctttactgtccggacatgatcttgaatcatctccttccatgagagaggaatctgtagaacttaaattgtaaaagtgctactgtaacccaggtagtttgattatttgatgtcctcgactgttcctcagtatccgacatgatctttaagcatgccccagctttgggaaatctccttcatctagatgcaaccatcgaaatgcaagccgtataatacattacttatataatgacagtatgctgaattcgagcttataaatttgatggtcgcgtagatatatctcaggcacagttcctgaaaacacaaaaccaaacagaccaattaaattcatagtacccagaatgatagggatataaatctacctaagcaaagacgatttcgtcgattaagttctgtaatgtcacaaaccaattttcagaagttctgtgagaggaaatatataaaaatttaagagatgaacttggcagtctgtgtgacatgaaagtgagacaaaaactcagtcacatgaactcttcagcttcaagataccaacccgatccaagaaatatataaaaattatttcttcacctatataagattaggtaagtaaataacaaccctaagagatgacaatctagagatgaacaaatttagactatgcatgtataatcaccagcaatatataaaaagaaaagaaacagaaatcaatagcaaattaaaaaggacgaaaactgaccctgaattgaaggagagtttctgctttgaattggctttgttaaggatacagctatcctcactcgttcaaagcagtaactacagttgtatccttctaacctatagctgtcatattatgtcgacattctaatatctgtcaatcttgtatttttggtatacaatcttgcaatttcttctgtaataatagccgtatacggctctttgtatcgaatgagaatccacaatatcaagtgtggaacatttcaccaaaacatattgtcctagcttggtatcgagtctaaagatcaaaaacccacgcttcttttctttcaccgtggctgaaacttcaacacttcatcaaatacacatcaaccatctgattagtgtcaaactcaatgacaccaactatctcctatgggtgacacaattcaaacctcttctcaaaggttacaaattacaaggttttgttgatggtacaatggaaaaaccagcaaaaaccatacctgctactgaagaaggtgaacaaccaactcctaatccttcttatgcaaaatatgaggaacaagatcaatactcttagggtggattctttcctctttatctgaaggtgtattaggtcgagttgcaggtctctcaacatcacaagatgtatggaagcccttcaaaggagatatgcaccaaaaaccaaagctcatcaaatgaacctgaaaagacaactacacagtcttcgcaaaggtaacaactcaatgcaagattatttctcgaaaactaagcaactttttgatgcacttgcagcatctggaaaacctctctatgaagaagatatgcaggaatcaattctagctggactggatcaggcttatgactccattgtcacagccttaagcactgtcgacaagatcgacatggatacttttcaagatcatctgctttcatttgatctccgtcttgaacaacagttagccgtattgcaacaacctctagccgatgttgctgcctcgtcaaactccagaccatttcagaagcaagatcaaaggagatatccaaacatcgtccacaaaataaatccaaccgtcatcctagaaacatgtatcaaggtgaaggtccttgtgagatctgcaaacgcaagaatcatgatgctcgattctgctggtttcgtaacaaagtggacaacaacaacaaacagccagctgcatacttggctctccctggtggtcctgctgataacaactgggtgactgatacaggtgcaactcatcacctgactgcaaatctcaacaatctcaacattcggcatgagtacgatggaactgaacaagtgcgcataggaaatggtgaggctctccatgtctaaaatattggtaatgcttccttttctcataataacagatcctttcagttaaacaataatctccatgtccctcaaataaagaccaacttactttcggtctttaaattctgcaaagataataacattttctttgaattctatgcaacttcttttgttgtgaaggaaatccagtcgggaacaaccctgttgcaaggcagacttaagaatgggctctatgtctttgatgttgttcgagagattcaacatacaacaccagatgttctactatccaatacagtccctctatggcatcaaagattaggtcacccaatgcttcgcactgtttttaggatgattaaaaatctttcccttcctatttcaaataagaagtttgattattgtcactcttgtcatatgagcaagagtcataaacttccatttcctactagtaaccgttgagtttaattgttgctgatttatgggtttcaccacatgtttcaaaagatggttttagatattatattcttcttttagatgtttactcacactatacttggatttatccactagttagaaaatcagatgcctttcccatctttattcaattaaaaaagctgaagaaaatcaaacaaatcataaactcaaggtttttcaatctgaaaatggtggagagtttaggaagtttacctctttccttaataattccggtgttatacatagatttttttgtccccacacatctgctcaaaatggcattgctgaaagacgcattagacatatcactgagtccggattagctctcttgtttcatgcctccatgccaaaatcataccgggtagcagctttctcaactgcatgttatcttattaacagactacctgcatcccaacatgaagctaaatctccactccaactcctatacaacaaaaaacctgactgctcctttctaaaggtttttggttgtctatgttacccatgccttcgcccatatgtctctaataagctt

SEQ ID NO: 36 - DNA, 227258 bp, Papaver somiferum
aagctttgatggtggtgagacaaataatgttaccacttctgaacttccataacaatggccaataattttttttcataagtggataaagctagagcttgtggtcccaagtgtttgctgtagaaagctataggttggtcagattgcattagaactgcacccacgcctgtagaacatgcatcagtctcaggaaaaaatggctgagaaaaattaggtaaggccaaaactggagcagatgtaatgtcagctttaagagatacaaaggcatgcaatgctgaaggtgaccaagagaataaatcttttttaagcatcttcagggatcaaggtcatctacccaaatgggaagtgcatagtatcagttttaccatgaaattaacctctcaacgaagcaatttgtcacagaatcatacttcacatacttttcaaccaaagggtatagcccagagtcctttactaattattagacctcttcacattccttaaccaaaagccagtgactcgcgtcttgatgtcggcaaacacaaacaaatttcttattatcctataattaggagataatgaaattatacataaatataaatatcaagaaagtagacataaatatgagacattgaaagaagacatacataaaaatatacgagaagaaggtaaaaattcttacataggtttggtaaattcgttgagaccacgtgtccttatatccaaataggagtttcggatcgcgcacttgagcccaaactttaccatcatcacgggcgggtaacatttcattagaataaggaaggtgcgatccttttatattgactactttcttcttcttttgttcttcttatacttcatattcaccttgtaacaatccttcaccttgtttcgcttgttcacttggaccaccgtattcctctaaaacttcgctttgggtctcttgtcgacttggctcaacctcatcttcctttttatcgttcccatcatatgattctccggtatgttcacggatgcaaattttctacgattcctactatcccaaagttcccctctagttagggttttggaaaaaaaaatttatcgttagcaccatcgtcgattcaaaaatatcttcgtcaattacccgaatctataaccatgcctccacgaaagaaacccaatccgcaatcaaaatcaaaatcagtacctcaacaaaaacaagagaaaggatcaatcagattgctcttgaagaagaagaagaagaagaaaaggatctggaccatcaatctcttgaaacaatggcttctgtaagaaggtaggtgattctgaaacgttatataaatctttaatttaatcgatttaaaaaagtgagtttaggttagaatcgcgaaccctaactcaattagttgagttacaatcaatttcagcattgaaattagtatacaatgccggtattgtgttatggcattcaatttagtatgaataccatgtcggtaacgtgtttcggcattgaatttggtatgaatactatgccggcgaaaaaactaaaatcatctgaaaatgaatgtttaatctcgtcattgatattaggatgaataccatgccgggacttgtttacttcatattttttgtttttacgtgtatgccagcaatgctctttttatatacaagaataacctcagaattacctaagactaccgaaattttcggcatttttttttaccaatggcggctttcatgtcccggcatagtttatttttaaattacaatgtcattttgtgttcccggcatggacaatttttcgctaaacaatgtcggcccttgtgtttcaatgccgttattctgcatatctatgccgacatatgatatgattgttagttatcgtttatttatttcgctaaacaatgtcgtcacagatggggatataatatggtttttttatttttagttttaaattttaatttatatggaagggtattatagtgttttcataatgtttttaattaatccaaaaaatattttagtatttccgtcccagaaaacatccttagcagacactattggatagggataataatttatccggccatttctgcgttcagtttgatttgcggagaattattcactagggacggacctataaacaattgaattatttcgtttaataatgaatgccaactttattatttgagggttgtggccaactacctcggtaaatcaaactattaattcttccgggagctcatcaaaaaccacatagacgtcaactctcataatcttagacatggcgaagagtcattcaagttttgccagtttcctcattgttttgattgcttgcggctttataatgtaagtaattattagctttatgatctatattattgttcatctcttttttcatttgcttccagtggtcgtccattttctcgtcttcttatagagatgtgaaagctggccgcggcggtattgattatgatgatgaaccaccaccacccccgccgagctgtttagattagggctgcacaacgggtagggtgggtaggatatggcctatatccgccaccctgcccgtttattggcggttaagaaaatctttacccgccaaatagtggataggataggatacggttaaaaaactggcgggtagggtggggttgacggatatgggtagggtatgtgcacccctagtaggaattgctcgaagaccagtagggtaggataatttcgagctttacccgccaccctacccgtttattggcggttaagaaaatcttcacccgccaccctacctgccaaatagtggatagggtaggatacggttaaaaaactggcgggtaggatagggttggcgggtatgagtagggtatgtgcagccctagtttagatcattgcaagaactggataacgaaacttttacaatgtccaaatgttagaaataataaatcttaggccatgaacatcgacattaatgatatagaattgtgttcaacccacaatacaagatgaaaaagaaactattacaatgtccaaatgttcgacaacttttgatgcgttttattacaatgtctccaaatttccaaattggatcaaaattcagaaaacaacttgaaaaaaacactcactcgaaagagaaacaaaagggatccacgttaaagttctaaggaaccgaagatccgtcgacgtactaacccgtacgttcttatttgatgagttcaacctcatcatttcatcaaagaaactatagccagaatgaagaaggatgcaatcatcatttccttttgatagttaaggaaatactttaaacgcttcaactcattctccagagcatttcttttattactaacttcatctcccaatcggaactggtgtaacaagtaatccatataattctccaagatgaaatcatttgttgcgattcttgcctgttccccgtcacagctatatatgatttcttcctcctctagatcacatctccttatttctgcttcttttactgcaatgttggtctcaagatattcaaccatggccgttaacatatccgactccaacgtcttttgatcagacgaaatgcctttttctgcatccattgggagagtgattttgtttctgatgatgagaatcttgcgagagatagagaacagagatcaagagaaatttgattgcaccgtctctgtgatctgctaaaaccaaccatcaccggagtctatttgtagtggctgaaccgttaaccgccttttcatttcaaacgacaatgcttttggcgctcgcgtctttggttatggggtacggctttccatggaaaggcacgtactatcactagaggcagcttacaaagaagttaagagcacccaaacaactcagacggatgaaaacatgcatgcgagcctccggaaaaaaaaacattgtggatcacaagatgggcatattactcaggtcatggtccttttatgacattcttacataggtttggtaaattcgttgagaccacgtgtccttatatccaaataggagtttcggatcgcgcacttgagcccaaactttaccatcatcacgggcgggtaacatttcattagaataaggaaggtgagagtttcctacctcatacggctcaacaatcaattattttggtgtcccatcttaatcgaccctatactaactaaataagatttttcataaatctatcccatttttgtttctcgggttaaccagaaggggttaattatatttacataagttttaaacttgcatttttattcaaaataagttttatcttttctcctaccttcagaaaaacgaaacccactatcctatctttttctgaaaggtaactatctcagtttcattttcatatagaatctttgaaaaagactttcctctctaagaaagaaaggacttactatctttgggatctgatgctacaccgctgctcaataccttagtggatcaactctattacataagttgattcctaaattatatctcatatcatgacataagtaagcagttttttcttattgtatcggccaaaaatttcactaattgatctttacggcgcttcctctatcaattagatcttttatctatccatagaatatagtattataggcatatccatttcttcatttttttgcttttatgaagtctctttctttgctacagctaataaaaatcgttgctttgtacgatacatatgtagaaagcctatcctctagtatttactggcgtattttatctttctttccctctttctatagtggagatagtcgcacgtaatgacagatcacggccatattattaaaagcttgtggtaagaatggatttcgttctaatgcccggaaataatattccaaagcttttgtatgttctccgttacttgtgtggataaggcctatgttatacagtatataacttcgatcatagggatcaatttctagtctcatagcttcataataattctgtaaagcttccgcataatttccttcggattgagctgacatccgttgcggtcgttcattctattcaaagaatccccgtttcagaaccgtacgtgagattttcatctcatacggctcctcccttctgtgcataatgaacgataataatccatggaaccaaaagaatatcgaaatattctcattatgaactgacagggactagtgtttttacaagaaatatctagtcagccttcctgcaagaggtcttttcttaacactaatcgtgttgttgctagatagaaaaggttactccaacaatttctttgtcctcaacgccccctatttccaggaattagtcacttcaacagtctttgatggttatataggtatccaaagtacaaacgagatggatgtttgttgtcccaaccattcttgttagttccgatcccgataaggaaagggataatttataacaaagttttttttgttgattcctaggtgtagtgcttcttcccctatgccgcctattggttggtactgatggagtaggattgacctctaatacagaaagaacctatagatgtaacctttcgttcaatactagattagaaaattgaagcatctgaggctgcatcaatcggggatacacaatagaaggaattggtctatttccaaacttcaccttcaagaagcgtagatttttttaaggtttatttcaataaacgcgtttcattttataccgaatccaaccctgcgtgcctttactcgtaagacagagaacactaaatagaatcaaatcacaccatctctataataggtaaatgcctctttttctccggaagttgtcggaattacgcgtaataagatattggccacaattgaagaggtcttatcaataaaatttccatttatccgtgatctaggcatagttcgcaatccattctataattcttctcattacctcgcatgggaaaagaatcccacaaacaaaggaattgtacaggacgaaataacataaaaaaagactcgttctaaacatgaaattaatatttcctacagattatgataactcgagaagttttttattggattatgattcaaagaaggaaaaagaatagaataatcgttctatgatcaaaataccaccccatccgttttcatatttcgaattgttagaatcggttggtcgtacttatactgcaaaaataaatatgaatggctcgctattgacccgatttctgggtcataatcataaaattttgtaggagagatggccgagtggttgaaggcgtagcattggaactgctatgtaggcttttgtttaccgagggttcgaatccctctctttccttacctttgcctaattcaagagcgttattgaccacaatggatcaaataacaaacaaacaaggaataggattattccaagaggtagacctttctttgaaatgaattctctattcctaattggggtggtacgaaaaatattgataaagggtagccaagacataaaaatatccccgcggatccatttatgatacatgaaatgggaaaaatatccggatcacaccccttagcttcggtcaatttacttcggcgaaaagggggcaaaattctccgaatccttgccttgctatttgagttaggttcaagtctgacgggaataatattctacgaccagcaattcgtttattttcaagccgacccacttactatctattatttgattgactaaccctttatattgggatgaatgaagagtcaaatgttttggcaattcttcatgggaggatgaatcaagataattttgaatcagagctttggatttttgttcatccctcgtcgtaataatatctcggggtttgcagcgataacttggtatatctactatatggccattaactaaaatatgtctatggttaactaattgccgagctccaggaatggtcgaagccatacccaatcgaaaaagtatgttatccaaacgcatttcaagtaattgtagtaaaacttgaccagttgaccctttggcttttccggcggtacgaacatatttaagtaattgtcgctctgtcagaccataatgaaaccgcaatttttgtttttcttctagacgaatacgatattgagactttttcacagaacgcgattgatttctaagatcatttccggctttaggccttttactagttagtcccggtaaagcccccagacggcgtatttttttgaaacgaggccctcggtaacgagacataaaaactcctttttttatttacagaataaacctaaattaagactgaactaaacgataaacgaaaaaaatatactgaagttaagtactgtactacaaagaagaatgagatgaattgtatcaatattcagactcttttgtatatatagcaaggtaaggagactttgtcttaatttgttctgtagagatctaaccaaccgctcgaatctgttttttattcatagttggaagttcttacgacataatagatccgctatttttgagaaaaggaaagaagtcttttcaatattccttgagttcaaggagacattattaatcatgtaataaagtataaaatagaacaaagagagaaaagccggctatcggaatcgaaccgatgaccatcgcactacaaatgcgatgctctaacctctgatctaagcgggctcacataacagaaattgtgttgtgcataggaattcggtcaactacttagctcttagctattcaaaatagataatgaatatgaatagagaaaaaatgaatactgaatagaatgttattctataacaatataatataacataagaattaatataacgataaatagagtgatatatgatatcaaaattttcaatgggaagaaattctacatttttcttttccatgattctcttttatatttataatttatatgaatatgattatcaatatcttaattctaaattattagaaattaagaaaaaatatggaattctaaaaaaagaatcgaacgttcaagtatttaaaatcgggtaggaaaagtgcgaggaagagaggaatatatatgtggtatatatccatccatattgaattgcggatacatcaatgatagaatcatttctgattaaaccaaatgtaggtccttcaatatagaaaaaggggtaaataagaaagaaataaaagaaatcaaaggaggagtaaagagataaactttttagatagataagctgtatctaatgaattcaacggttaacggttccagcataaacgaaagaaagaaggggatggcatcccagcgagatcttcggctcaaactaaaaaggggatatggcgaaatcggtaaacgctacggacttgattgaattgagccttggtatggaaacctactaagtgataactttcaaattcagagaaaccccggaattaaaaatgggcaatcctgagccaaatcctgttttcagaaaaaaaattaagggatttctgaaagcgagaataaaaaaaggataggtgcagagactcaatggaagctgttctaatgaatggagttgactgcgttggtagaggactccttctattcaatttgaatttaaactccataaagaatgagggataaacctacgatacgtacgtatacgtactgaaatatcaaagattctattaatgtctccctaaaatttttttacataaaaaaaaggaataatttttgtgaatctattccaagttgaaggaagaatcgaatattcagtaatcaaaccattcactccatagtctgatatatcttttgacgaactgattaatcggacgagaataaagatagagtcccgttctacatgtcaatatcaatacagacaacaatgaaatttatagtaagaggaaaatacgtcgactttataaatcgtgagggttcaagtccctctatccccacaaaaaggcccgttttactccctaactgtttatttatacttctactcttttttcttttccgcagcgcccgaaaattagctatatttctcattcactatattatttcacaaaaggatcggagcagaaaagcctctctcgtatcacaagtcttgtggtatatatgtacaacggaaactctatgatcaaggaatccctgtttgaatcattcacagttcacatcattattttcaactctaaaagttttcttttttgaagattccggaaattccagggcctgggtaagattttgtaatgcttttttattctcttgaattgacatatacccaagtcatctagtaggatggggatggtgcctcaagaagggttgggatagctcagttggtagagcagaggactgaaaatcctcgtgtcaccagttcaaatctggttcctgacattgagtatctactgttaagttcctgccattgagcatccattattaacctgtggttaataatagatactcatacaaattcgatatgaatcagcatacatacatgatttcgtccgaatgtctagagagagaaaatcctaccctttttcttaaagtctgtataaaaaaaggaaaagaataagggaaaagaaaaaatacaggttgagtaagaaattaggctaaagataagaagtgggccttccttttatattgactactttcttcttcttttgttcttcttatacttcatattcaccttgtaacaatccttcaccttgtttcgcttgttcacttggaccaccgtattcctctaaaacttcgctttgggtctcttgtcgacttggctcaacctcatcttcctttttatcgttcccaccatatgattctccggtatgttcacggatgcaaattttctacgattcctactatcccaaagttcccctctagttagggttttggaaaaaaaattttatcgttagcaccatcgtcgattcaaaaatatcttcgtcaattacccgaatctataaccatgcctccacgaaagaaacccagtccgcaatcaaaatcaaaatcagtacctcaacaaaaacaagagaaaggatcaataggattgctcttgaagaagaagaagaagaaaaggatctggaccatcaatctcttgaaacaatggcttctgtaagaaggtaggtgattctgaaacgttatataaatctttaacttaatcgatttaaaaaagtgagtttaggttagaatcgcgaaccctaactcaattagttgagttacaatcaatttcagcattgaaattagtatacaatgccggtattgtgttatggcattcaatttagtatgaataccatgtcggtaacgtgtttcggcattgaatttggtatgaatactatgccggcgaaaaaactaaaatcatctgaaaatgaatgtttaatctcgtcattgatattaggatgaataccatgccgggacttgtttacttcatattttttgtttttacgtgtttgccagcaatgctctttttatataaaagaataacctcagaattacctaagactaccgaaattttcggcatttttttttaccaatggcggcttcatgtcccggcatagtttatttttaaattacaatgtcattttgtgttcccggcatggacaatttttcgctaaacaatgtcggcccttgtgtttcaatgccgttattctgcatatctatgccgacatatgatatgattgttagttatcgtttatttatttcgctaaacaatgtcgtcacagatggggatataatatggtttttttatttttagttttagattttaatttatatggaagggtattatagtgttttcataatgtttttaattaatccaaaaaatattttagtatttccgtcccagaaaacatccttagcagacactattggatagggataataatttatccggccatttctgcgttcagtttgatttgcggagaattattcactagggacggatctataaacaattgaattatttcgtttaataatgaatgccaactttattatttgagggttgtggccaactacctcggtaaatcaaactattaattcttccgggagctcatcaaaaaccacatagacgtcaactctcataatcttagacatggcgaagagtcattcaagttttgccagtttcctcattgttttgattgcttgcggctttataatgtaagtaattattagctttatgatctatattattgttcatctcttttttcattttttcatttgcttccagtggtcgtccattttctcgtcttcttatagagatgtgaaagctggccgcggcggtattgattatgatgatgaaccaccaccacccccgccgagctgtttagattagggctgcacaacgggtagggtgggtaggatatggcctatatccgccaccctgcccgtttattggcggttaagaaaatctttacccgccaaatagtggataggataggatacggttaaaaaactggcgggtagggtggggttgacggatatgggtagggtatgtgcacccctagtaggaattgctcgaagaccagtagggtagaataatttcgagctttacccgccaccctacccgtttattggcggttaagaaaatcttcacccgccaccctacccgccaaatagtggatagggtaggatacggttaaaaaactggcgggtaggatagggttggcaggtatgggtagggtatgtgcagccctagtttagatcgttgcaagaactggataacgaaacttttacaatgtccaaatgttagaaataataaatcttaggccatgaacatcgacattaatgatatagaattgtgttcaacccacaatacaagatgaaaaagaaactattacaatgtccaaatgttcgacaacttttgatgcgttttattacaatgtctccaaatttccaaattggatcaaaattcagaaaacaacttgaaaaaacactcactcgaaagagaaacaaagggatccacgttaaagttctaaggaaccgaagatccgtcgacgtactaacccgtacgttcttatttgatgagttcaacctcatcatttcatcaaagaaactatagccagagtgaagaaggatgcaatcatcatttccttttgatagttaaggaaatactttaaacgcttcaactcattctccagagcatttcttttattactaacttcatctcccaatcggaactggtgtaacaagtaatccatataattctccaagatgaaatcatttgttgcgattcttgcctgttccccgtcacagctatatatgatttcttcctcctctagatcacatctccttatttctgcttcttttactgcaatgttggtctcaagatattcaaccatggccgttaacatatccgactccaacgtcttttgatcagacgaaatgcctttttctgcatccattgggagagtgcttttgtttctgatgatgagaatcttgcgagagatagagaacagagatcaagagaaatttgattgcaccgtctctgtgatctgctaaaaccaaccatcaccggagtctatttgtagtggctgaaccgtttaccgccttttcatttcaaacgacaatgcttttggcgctcgcgtcttttggttatggggtacggctttccatggaaaggcacgtactatcactagaggcagcttacaaagaagttaagagcacccaaacaactcagacggatgaaaacatgcatgcgagcctccggaaaaaaaaacattgtggatcacaagatgggcatattactcaggtcatggtccttttatgacattcttacataggtttggtaaattcgttgagaccacgtgtccttatatccaaataggagtttcggatcgcgcacttgagcccaaactttaccatcatcacgggcgggtaacatttcattagaataaggaaggtgagagttttctacctcatacggctcaacaatcaattattttggtgtcccatcttaatcgatcctatactaactaaataagatttttcataaatctatcccatttttgtttctcgggttaaccagaaggggttaattatatttacataagttttaaacttgcatttttattcaaaataagttttatcttttctcctaccttcagaaaaacgaaacccactatcctatctttttctgaaaggtaactatctcagtttcattttcatatagaatctttgaaaaagactttcctctctaagaaagaaaggacttactatctttgggatctgatgctacaccgctgctcaataccttagtggatcaactctattacataagttgattcctaaattatatctcatatcatgacataagtaagcagtttttcttattgtatcggcaaaaatttcactaattgatctttacggcgcttcctctatcaattagatcttttatctatccatagaatatagtattataggcatatccatttcttcatttttttgcttttatgaagtctctttctttgctacagctaataaaaatcgttgctttgtacgatacatatgtagaaagcctatcctctagtatttactagcgtattttatctttctttccctctttctatagtggagatagtcgcacgtaatgacagatcacgaccatattattaaaagcttgtggtaagaatggatttcgttctaatgcccggaaataatattccaaagcttttgtatgttctccgttacttgtgtggataaggcctatgttatacagtatataacttcgatcatagggatcaatttctagtctcatagcttcataataattctgtaaagcttccgcataatttccttcggattgagctgacatccgttgcggtcgttcattctattcaaagaatccccatttcagaaccgtacgtgagattttcatctcatacggctcctcccttatgtgcataatgaacgataataatccatggaaccaaaagaatatcgaaatattctcattatgaactgacagggactagtgtttttacaagaaatatctagtcagccttcctgcaagaggtcttttcttaacactaatcgtgttgttgctagatagaaaaggttactccaacaatttctttgtcctcaacgccccctatttccaggaattagtcacttcaacagtctttgatggttatataggtatccaaagtacaaacgagatggatgtttgttgtcccaaccattcttgttagttccgatcccgataaggaaagggataatttataacaaagttttttttgttgattcctaggtgtagtgcttcttcccctatgccgcctattggttggtactgatggagtaggattgacctctaatacagaaagaacctataggtgtaacctttcgttcaatactagattagaaaattgaagcatctgaggctgcatcaatcggggatacacaatagaaggaattggtctatttccaaacttcaccttcaagaagcgtagatttttttaaggtttatttcaataaacgcgtttcattttataccgaatccaaccctgcgtgcctttactcgtaagacagagaacactaaatagaatcaaatcacatcatctctataataggcaaatgcctctttttctccggaagttgtcggaattatgcgtaataagatattggccacaattgaagaggtcttatcaataaaatttccatttatccgtgatctaggcatagttcgcaatccattctataattcttctcattacctcgcatgggaaaagaatcccacaaacaaaggaattgtacaggacgaaataacataaaaaaagactcgttctaaacatgaaattaatatttcctacagattatgataactcgagaagttttttattggattatgattcaaagaaggaaaaagaatagaataatcgttctatgatcaaaataccaccccatccgttttcatatttcgaattgttagaatcggttggtcgtacctatactgcaaaaataaatatgaatggctcgctattgacccgatttctgggtcataatcataaaattttgtaggagagatggccgagtggttgaaggcgtagcattggaactgctatgtaggcttttgtttaccgagggttcgaatccctctctttccttacctttgcctaattcaagagcgttattgaccacaatggatcaaataacaaacaaacaaggaataggattattccaagaggtagacctttctttgaaatgaattctctattcctaattggggtggtacgaaaaatattgataaagggtagccaagacataaaaatatccccgcggatccatttatgatacatgaaatgggaaaaatatccggatcacaccccttagcttcggtcaatttacttcggcgaaaagggggcaaaattctccgaatccttgccttgctatttgagttaggttcaagtctgacgggaataatattttacgaccaaacatttggaatatcaaatatctaaatgggagggtcctttcatgacatttggaatatcaaatatctgagtaaatttttagtggggatgatcttaaattttaagtgggagggtcttacgtagataaagaaattgggaactttttagtagtggtgagaagaggtaaataacctcgtttagttggggccacgaaaaacaattaggagccctgaccaatttatacctgcaccataaattatagagattttcaaaattcagtgaaaggtctattttaccctttcctaataataaaagcaaaaaactattaattgttaactctaagccataattcattttcatttctaaaccaaaaaaaataagttctatcttttttctcgcctctccatcacgactccattaatgactccaagattatttttttcttcactcggttagcatttttttttattcacccaattagaaagtaagtgaactaaaacttactaatctacttcctatttgcgtttaatatgaagtttttttttttgtaaaattcagtttctaattgaaaaataacaattacagaataaaggtcgtcaaactcgatagttatataccctaacgaccctttttctgggttttaaggtatgaaaaatcgttgatgtctaaggtgtaggagataacgatcctttttctgggttttaagttttttttccctagaattgagtcgtcaatgtattatagaaccaattgacgatcctactctgacgacccttttttatacactaacgactctatatgaccaaaaactacctttctgtctaaaaagatggaaggatcgttatcttaatttagtagaatcgtcatttcatatgactacatatatgacgaccctaaatgttatattttacagagaattttagttttagagtcgttcttgtgtaaacagaacaacataacgactctaagtgacctagctaaaaagggtcgttaatgtttatcataccacctaacgatttttcataacctcgaaaagttgcaggtttgagtcgtcattggtagtgtaaataaaatgacgccattagagagtcgtttgggtatacaccctcgactatgacgacccttacactgagttgttccatagtgtggatgattcgaccacttggagcaataaacagataaatcgaagggtataagatgtttacctgattgttttgagcttcgggttccccatttttagggttggttccttcattttgagcaatgggatcttcatttgcaccaatattcatggcttcctctattaacatctcttcatcaaacatccgatccataggattagttgagacaatctcaccatcaacacaatcatgtttgttatttgaagcttcaccaacatcatttcctccactagaatcactcatttcaaataaccctaactttttccccaaaaactcaacttctccttcccacaacacaaaaacacaatttttcttttatcataaaatttaaccaaaatctgattttaatctaactaaactaattaacatcttaatttacctaattaacttaattaacactaataatttaggggtagtttagccatttaaaaaaatttgggataaaggataacccataattattatttcatgtccctttttgtcctgtagtgcagggcccctaattgttttcagggccccccaattaaaccagggtaaataaatgagtgtgttttgatactagataccaaagtcattttgttcgttaaaaagttaacttttatttctacgagtcactctaaaattgttatctaaactaatttctaactttttcttttcttatagaaatcaaaaactaatttctctaggatctgttcctatatctatatgtcaaacaccagaaaatgttacttttgcatccattatgggtatgtaaaagtggaaaacatatctgtcaatgtgtcaaattgccacataggcatatacgatggagtttccagtgaacgagaatgtccatcgttatatggtcttaaaaacgttcaatggtccatccaacggtgcctctcctataaatatccaagttcaaattcatttcaactcacaccagagtttctgattctctatagaatttctcaatctcacacatcttccatacttttcatctctcttccaattcttctaagagtatggctgaaaatatgaacatgaccgagttcatagaaaaccaacatactgccgaaaatcaaggattttttaaccaatacccaccaacccaataaaaaggcgattaaaaatttattgaaagataaatgtatttgtgggaatttttttttacagatcatcctatcattggtggtgcactccatgcccaaccattttggcaaaacatgtttgagatatttcaagaagaattaatgaacctcaacaatcgcgatgcccacttgttgagtcatcgcttctatacaatgagtaaggatataatgaagtacatgttactttagtaatgcttgaggctggaaacataaggagcggtgaaatcatgatggacattgaagaatgcaagcaggtggcatcgcatcaacgaaaaacacttccaatatggaagatattttgagattttaaaaggattgcgcagatataagccaaagtttattttttaatttcttaatcaacttaaacctaagtaaaagtttaatatctttcttagtttattatagtgtaggtctactttaatgcaagaatgaattaagaatagaatataatctcaactgtcaactatatgggtcaaattttcgaattcatatacaagtggatttttttgataaatttcgaattaattattttggtcattttacaagacatagaactagacaataataacttaaaatatacactacaaaaaaaaaaaatctgggacaatgttttccatcttgtttatcttcttcatttcacatgatttccaaacaatgcgctcattatctgagtttcctttgtttatcttcttctttgccttcaaatttgctttgccttgatttttcgtgccttaaactcttctctactttacttagatgcaaatttgacttggttaatatcaaaaacttgaagacattgttttttacttattttattactatcacatatcttcttaacaacaccttaaagcactacaacagaaaaatcaaattgcgttatcaaatcaagttggttttgaaattttgccatatgagaaattctgaaataagtttgattgagaaatagaaaagtagagaaaattttcgtgtacaatttttagtgtaaaattctcatttgaaaattacctataagcgagaaagaactatccgttggcgctagtcattatatcgagcgatgctatcattatacccgatgataatgtctttatagatggcgctattggcaataccgctcgccaggaattccaccgcttcactcaattatcataacggcacaactcattttccacgccacatggtatgtcaaatacaaaatggtacatgaataagcctaatagtctgtttggatagacaaataaaagctacttattgacttacgaaagtcagtaagtcaaaagtaaggttggattaataaaatactctcttcgttccgatttactggacgttgtagaatttttcacggatattaagaaatatcagagagagtaaaatctttccaataatacccatattaattcctacttaaataattaaataacctagtttgtgtttctaaaatatagggaaagttatcaatcccatagttatgtacttgggatgtacaagattgagtatatatcctccatggggtatatttaaaaattagagagtaattgtttttgtgttgattaccatgagaattaattctctggtgtgattccaaaacaggggtagattagtgaaaattgagaaaaaaaactaaaactatcatctaatttagaacacaaaagaaatcctaaaaaagcaagtaaaatggaacggagggagtaaatctacttatggaaactacttataggttttcaaccttggggtcctgttaaagcagctttgtggagaagcaaaaaaaacttggggtcctgttaacttgtatacccgtatatatgttaaggtccattaaaataaaaactctttgcattggaaacaagatttgtttgttttattgaaatgaaaataacatttctttgcattgggaacggggtttgttgtttttagtgcaaaaataactaatttctagtagaataagacaaaaaaacacaatttccaataccctaaaataattctttattaaaccttaacatgtatacgggtatacaagttaactaaaaccaaaaacttgcttctcaattcttaaagaggtaactcctagtgggacccgcattcattaatcatctttatcgggttctccttcttcctttcttctttctttcttctgtctctctttctctggcagagaacttaatcctaaagaaaatgaagattcaagtctcatgtaaatttttttcattttaccggtagttttggtagtcttcttacaatattgctcctaagatttttattgatttatagaaatatggattggatttcgatccttaaccaaataaaatttaatttttgatttggtcgcaacaaaaatgaatatggtgatcaatgagaaaaaaataatcaatgggtttggaaacattatggaaaccaaactttaagaggggtagattttagtttctatatatgattacttgtcaagaatataaaatcaaagcttggaaagacgaagttgtcgacgatatgaatgtggaattataggcattagtgatcacatgtacaaattcaattttacttttccctttgtttgatagaatatatctggttaagtataatatccatttattaaatggttttggaatggtttgcaactgatgaataaaacatgcattcttaagtttgatcgaacatacacttttaagttaatttaaatgatcaatttgtgatacgaaaaatccgtgaatctgtgtgttttagctgaattgaagcatttgtatattgatcttgtgatcatcgaaggtctgctgaaaatgtaacgatgagattatcagatttagcttataagtaggggaattgccaaacaagcttttttttacttttgtcttctcagaagtgcttctgcttctcacagaagcacttcttgcttctacttttatatccaaacagactataagcggtttccaaataatcaaaaagaatgaagaaggtacttttcaataaagtaacttttccacttgtaaaagcaaaaagtccagagtctggacagacagtttaaaaatgacttcaaaggtttttcggattgggcataatattatcgaagatcacttgacatctatatctccatacgtaccaaatattataggcgtatgtttccctcgggttatagtcttttaaccataataaatactagtctatgaaatttatttagcaacattataaaacatcgtaggtaaaaacatacctctccagaatgcttgaaagaaagtgcgttaagtaaacagatggtcggtgtcttcactaaccatattattacccagggaacattgaacactacaccatttttcgagattagcatcggctgtctgcgggtgcaaatggacttgcaacagcatccatccgtttcgaaacttggcgttgcattttttttgcaacaacttccaattcgttgggaatcccttttgcagtggtttccggttcagccaactttttttccttgattttgcaacggtggccgttgcgaataggtttagaaacagtttcgagctttactatattctttttgcaacagccactagcaattgcgatatggaatattcgcaactgttctatagcagttgcgaaatttagaaccaaaaacactcagaacggctaatcttagccggacccggttttattattctggttctaaattagcaacagtgaatagccgttgctaaagttttgcaacgaaaaaacaaagtcaagtcaatcatcagatgacctagtcaagagttccctagaaaattttcaggaaaaaaattcaggccaagaattcatcgaaagagacatgaattgcgcattgaacaaagaaaggggcattaagtgtgcattgacaaagatgttcatcattactaatagaaaaattcagtaaacatttttaaagttttaaaaaaaatgataagtataaccaaaatctctcttactgcactttgttctctgccaaaagactggacccaaactccatacactcgagccattgctgtcatatacaaacccatgatctcagtgacataatcttgctctcttctcaactgagtctccagccactgcttggtcgacagcaacaacaccggcagaaagactcatatccatcacagatccatacttccaccagttcaaaccattataagtatgagacattcaccaaaagaaattgtaaaatgaaaacacaagttcatgaactaaccccaactatctaagttttcaggaaaccaaaatttgctcttatgtattttatactgcttggtatactttctgaactcttttgctttacaaacacacagttctcccacataataatcaagatatgaaaagacattatgtatgctcgttatattaaaaacgcaagttctgaactttacgttgtccgtagcacaaaattaccttcaagctatcttccaagatacgggtgaaatagttctgaagctcagaccctctaaaagtatgtcaatatttcctaccaatcgggtgggttctacaaagaaacatcaaaaataacatccatcactttcgtctcaatatcagtgtacaaccaagagcaataaccatacatgcagtggaaaaaacagacaatgcacttacattgaatcgatccaaattaggcttcaacttcccatccaagactttgagagaggtagactttccaattccattagttccgactaatggaagaaatctagatgcaagtataaggtaggaaaaaattccagcaaggttcttgaacaaatctagttttctttcctctgtaaactgtcagaaaagcaccattaaaccagaagtttaataactcgggaataatataaaaccatgaaaagcacgtgataaatataacaggaatctaacccaaaaaaacaaacttggatctcaaattacggaaatatcatacaacatatgccagagtgtaaggaggttctataagggcgacatgcatacacctactttaattcctagcatctataccccattccctatagaagtgcataaatctgagtcaataatgaaccttttaatttatttgtatttgtagttgcagttatattaggatgagacattatactaaaggaccacagataaaggaaaattagagagggcactgactcaaaagctattatatgacctcctaaactcactctaatcatcctgaaaacaaagattccattccgaccttgcttctatcgatgtactattgaccttgcttttattgatactgataggatcaaataaggatctaatcatgattaacccgaaaattagcataagagaaggttcagttcattaccgtagttagattgaaggagagtgtaataggttcggttcattaacaacagagataaatgatcattaaataaagacttaccgcaatgcattttttctggacgacatcacttgatgaattccttgcaaacagaattagccagcattaagcacaccaattaatcttccaaaactaggggagaaagcatgacgttaatggaaggaagtaagagaagtggagaaggcatcttaccaaacaggaatgctttcgcaaaggatgaatgttggttgagtgtacaatcccatatgtacttttcaaacactagtcgccaagcacaaacaaacccttaagctatccttgcagtatccttcattgagttctctataatccctggatttaagttcataattcacaacccagattacacgaacaaaccaaaatcatctataagaataccaacctaaggctaccaaatttatgaaatttacaagcagacaaaactgaactgaacatacatgataagcttgagaggattttcgagcagcactgcatgataagcttgagcaagagctaaagataacatgcttaaattcctagaatcctcaagcatgtttaaaactacttcaagattcatttatcaggctctcaacatgatacatacattgcaacattatgcttatgcattacggatcctatgcagttctcgggccacaagtgctacccaagaacttaagaaacactaggaaacaaaagggtaccaggaacataattaccaggaagaagatatccagcaagacctaaactgtaactgttatgagcaacagaagtttttgtccaagagcattcaagccatacgaatattgcacaacgttggcatgatccgggaaatcaatgcaattggtcctgcaacaaaccaaagtccataatctctctcgctcctgcaacaaaccaaaatccatgacaacacgaccttataactaacaaaaagtcacatctagctaagatattacaaggagaaccaaagtcagaaattaccacaataccaagctgtatggaagattgattgagtcatgttgtcccactaagccttggtgaatacatagtggtcaaataccaaaatcaaggttccgtatatgtagtgagcgacagaccattcttataatagtgaattaaatatacttcgtgaagcaagtgaacaatcagttgcgccagcgaagagcggtaacaacataattcagccactacaagtaaaagaagcatatcttgtggacaaatcatttaatagatcttaagctaccaagttagtcagggaatatttgagatggaaaattgtatcgagttaccgccatatatttagtgaataaaatcatttaaaaacagttcaatgatattcctttacatcactatagaacttagcatgaaagtatcactcatgaaaatatcaatcctgaaaaaaaaagtatcgagccacaaagtatcactcctgaaaaacaacagtctcaatagacatgcacaagcagatctttccccacaaaataaaaataaaaatgaagattcacaaaaaaacatttccgaacagagcttatacattgaaaaattgttgttaaaaattattctgcaaccattcaccttcatacctgcaaccacagaacatacttgacaagctcttcttgagcaacatacactccttttcctgagataaatcatcccaaactgttccttcacaacagtagacggtcaagaacattagtcaattaattactaatacagagagtataatatactgaaacatccacaattgcatatacaaatcttcttaatcacactcaacaaacacaaaaaccataaacctaaaatctacaatcacatataaatctaaaagatatacatgttcataaacactatcaggaattgcatcattcaaattcaaaaccaatattttctaacctccaatttgtaaaattattaaacccccaaatgttgaaaaacaatgattcatagaaaaaccaataaatgaaataccttagatgatgataacccagatttgcatttccaagattgtgaatcagtgtcaaaacttctatgagagatcgactcaacttaaatttagggttacatcgatgattcacagaaaaattgactgattcgtgttgttaatgaagttctctgcaactacatctcgatgtttccgaagctcaaatcgatggagtaaaatggacggagaggaaaagggaaatgggtggagaaatgtctcaggctcttagttgttctggatatatttattctcttttaattttcgcacaattaaaaaaaatgaaaaactaatttcattggttttagttttgttttctgattttcggtaattaaaatgaagagttataatgagaaaaaaatgttggagaaaaaagccagaatcgttgggaggctgggtatcccttgagtgtgagatgaaattgggagctgatagtagtaatagaggcgctaatagtagtaatgagggtaacaatgtaacttgccaatttaagttgaggataggaaggtaattacccaccaccctcccgaaactctttgacagataccaattattgcaacgattatttaacgttacaaaattaccaacgtcggtacaacgttacttaaaaaatatccgttacaaaatagggtgttacaaattccctgatttcgtgtagtgcaacaaggaatcatttatagtaacatcttgaaattgaaaacttttttgaaagtaatcaaccaaggtatcttctatttgtgtttgatcagttatcatattaccattttcatcttccaatgcacatatcaaattcattgtttgcctagctttggtgtttgtatgaaagaattcattatctgctgaaccctctttaacccattttattcttaatttttgctccatcataatgctatattgtacttcccttgattgagttcattttgagaaaaactaaatctgtcaaagctttctcatcatgagggttgctgtcaacaactaacattttttccatcaccaattcttcagcttctttaatctttacttgcacatttccaaaaagtttccaattcgattctttcaaaataatttttaatcttttaagcttttgtataaaaatatatgttggatccccatttagcggtgtagaccaactttcctaaactaccttcatataaacaggatgttctagccacattctttgaaatctgagaggaacattcttaggattaggaatactgacacaacctctcatcaaacaaaaataatctgagattactctaagctcccactttgtatatatccccagtcactgtataaatttatctactccatattgaaaacaacgatgtccatattacacaatatccttttactcccatgctgacaatttgaccaagaaaaatacaatcatattttaggtgcctgtaataattcacaattgtttaaacattcaatgaagtctagaatagatcttcttgaaggagaattgccacctactttctcttctattgcaagaattgcattaaaatcacccatgacaatccaaggttttttaagctcactaatcatttgcatttcataccataaaaatattctctgcaccatatttgatcgaattttatatagtggtaagaaggttgtcgttctctcagactttgttgaattgattctaagcttaaatataaaattactaaaaataagaaattatatacaaaatatgtcacgggatgaagaatttactgggactcaggattccactgcttttcatgttcatggggttcataaattaatcctagacatttatagctcaaaacaaaagaaacaataactctattcttttccaaagtagatttcataaaacattagttgtaagttgtgagaatgacgcatcaaaagtaattaaaaccaagcatgcgacatcaaacaaaataataaataattaatagaaatcataaaaaaattaaattctatgcaaatagttataaaagaattattttaattaccacgtgaacgaaacacagcctcctctgtcgtcccagtgatgggtctagctctgcatggtgaaaacacactcaaaggaatttttcattgctcaaaaaggtgtttacaaatgatggaaaaggtgagaaataattaacaccgggtttgtaacaattatatttgttacaaaccaaactgttacagagaacgataaatatgaagtgtcgctggcactgtagcaatacgactgtcttctgtggtctaatgttcttcgtgttcttcttcaccagcaaaactggttcatctctgcaacttgatttttctccatcctcaaccctctgttcgctcccctatcactccatatctcctctgcttctctacgtacaccttaaatagcctcccagaaccgaaaataatcctccataactccagcaaatcttctattactcggtattgaagaaaaatattctcgggaatattttgttcccctgtttcacgagattccgtgtatcttcctctttgatcgaattgaaagcacttaccaaccctgttgtagtataacaggctggtatatatccaaaacaagagaaaatccgaccaaatatccatgagtttaatggagaatatctttccatgcacgtacacctctgtcttcttcaacacgagaatctagccaattttatccgacaaaataagccataccatgtttgttaagaccggtcagatcatcccaacaattctcaaccattgagtctctctaaaatgtcctcaaatctcgaacaaaaaattctgcaggtgagaaacaagtttcccgccaaaattcagtttcaaatgaggaagattatggttgctccctatccagagtatgggcgcctttaacatccagggttcctgggggttcccttatccaaaatgagggtgcctttagtacttttctgggggggtgccccgagcaacttctcgaaccgaattttccaaaaatgtttatttcccaaaaatacctacaaacacataaacaccataataagtacgaaatcgagtaccaacaatacagaacattgaggacaaattagacacaaaaatgtgtctatcaaatacccccaaacttattatttactagtcctcgagcaaaactaatctagaaaaaaaaaagagcctaactcgctaggtggccctagcgaccgagatatagtctcgggagggtttaccagaggtgtacccacaaaaccattactccagactctagctatctacgcagaaccttggaaggcactaaagaatctccttggttggcatacaaacattgactataggaggaagtaccctgatgcgaaattccaattgatgtacacgagtttgcactcagcatactataattcatatataagtgacagagctctactcaggtagtttctagacatcataaccggagtcaaccaatcacatggaaagattaagaagatggataaagagaacatagatggtttaaagtgaaaggtgtttcccatatctgtctgaaggcctctgccaagatgaacctatcctaatggactgagataccggtctgactaatatcaacacaactggcaaatacaagagaaccagtggtcgataaacctaactctaggtcaacacaaattgcatatacaagagcaccagtggtcgactttattgaatttattccggttggtctgatggtctggtctcaaacttttttttttttgtggtatctcaatcactctatttcaccctagcaatggtaacaacttgaatcgtgtgcccaccaaatcacttaaaaaaataaaaacagaaggattaagattcaacgagatatgggaaacctaccatgttttttttttttttttttttttaatttctaacacctgagctctgtgcttttatgaatagactctttagttgtttccatctaatcagattggttcctcaactcctacaaccaagatgttcccatccacttagattggttagcgccatccttaataaacataaatttctaggctttggagtttatttattgcaactaaaaagtttctcccatacccccaaacttaaatctaacattgtcctcaatgttctaaagataaaattaaaagcatgaacaaggagaaactgttaccactcgaagcaaaagagttaatgaaagatattaccgtgttgcatgagattgggttacctcccaagaagtgctaagtttaaagtcttcaaccagacatcggaagaaattaatcacctcatagaatcataaagcagtagccggaataactgtgggtcatctggatcaaaaagtgctaaccacaagaagaggaaactacaacaaaccaagaagacatcgaacatacccttgtttaagacaagttcatctagttgtggttcaggttcaggctctataaaagggtctaaataaaaagatttcatcgattggatttcctcaaaggcattctgaagatcaggctgaagagtctggaaatactcaactaagaacttagaagcgcataacataagcctgaataattggggaccctctaagtcaatcagatttgactcacacagctgaccacaatgaaagacgtggtcttccttaagaaaatgtgtcgaccctattttcctaaagtaattaggtttagtctcaaaacttcacatctgaaaatcatatgttcccacaattggaagaaaagtttttggtgggaaagcgaagtcaatcttgatatcatatcatgggttaaccacatcaaccagaggatgggtttctaacaaatgagctctcttatggacacaactaggttcaggaaaaagtgtatgaagataatcttgtaagatggttgaggcacaaatgtcaagtcctacacgagggaactttctaagagttaaaggcaaggcaccaagaaagtgataatcaccctcaaaacttagagttttcagtgtctctaggtagactagtcacaatttccataatttctaaatcattagattcttgaaaatggtcaattgattcttctaagttgtaataaggtgcatcctcactcatttttacgatttcactttctttgtctaagactgttgtttctaaatcgctagactcacaataaactcgttcttctaaaccatcatcacaatcatataaaggattatcatagaaagtttctagtaaaggctcattaactaaggtgttaatcaaagttacttcctctgattcactgataggcacatctaataatggattatccaacacactgcagtgctaaaggatcatgaactacatcgtctaaaacggtggtatccctagtcaaatcctcatcattttgaatatgtgaataattattaaaattatttggatttgtactagaaacaaaactatcattataaagctcaatcggagtaacaaattcctgatcactatgcctacatatttcatgttcttcatcaatactatcctcgtcataatcatcattataataacatgaaaatgatcgaacatcatctaacaagtagtgttaccaattctaacctcttcatcttgattattataaaaattatcctcattttcacgggtgatataggaaagaatgtattggcaatcacgagtaattcgagcttctctttcttccgtctctaatccaagcctacgtgttaactcagcaaactcacgtgttgactcagttaacttacatgttgactcagataacttcatgaggatatcttctaaagaagttacactcatttttaccgttctttcgtccataactaagtcatttgtgtccgctaacttatgtgtcgactcaagtaacttacgcgttgactcaagtatcttacgtgcttcatctagaggagaggaattttaataatcttgctcgtatgatcggtgggcatgtggatagtaattgggctcaccatagtatgacccataaccttcaaaagtttggtgttcccaaccactattcacactatggtcataaaaagaataatgttcatgttgctcagtcgaataatcattgtattggctataccagttcgacatcctaactacaaggtaattctaaacaaacacaaagaaggatgactcgaccacaacaagcctattttatctagcaaacaaaaagcatgatggctcccttagattgtttctagaccagattttattctttcgaaaaggaattcgttacaatctgagcaaaactctctggaatcaatccgagttaaaataagttcaatagagacgagggaagctaagtggagctttgatacccaaggcctcaccggcgttacaaggcggcgtatttaactcacggaaaccatcatgaactttaaagtatgctcaaaagagtaaccaatattttccgaacgactttcctaataagctcgttaccctatcggtctcgttcaagtccaaattttaaggcttaggttcccgtaggttacgtgttcctaaggcgggaaagaaggaaacggtgatgaaatccgagtccttatcttgattttgccaggcctttacctttactagaaaattaaatccgatttcaggtcctcaacatatatgcatacgaaatcatccagtaaacccgctgacaggggattcgcgggtgtttagaattcttacctcccgttccagacggaggatgaaccgttgaagtcgactcgggccacgactcctatgtcatgtacgaacccgaggggccgaggagatatcgtaatcgccgtccttctctgcaaacagtttatttaaaactactcttccatagggttttaaaaataaagtcaaatgttcaatgtccaaaagaaaagaagaaaaaaaatgtccaaaaataaaatattacaaaaataaaaataaaattatttacaaaatattcttcttcactccttttggatttctcttttctttcctttttgggattttcctttcttttcagcactttctcttttcctttagcttagctccaaatctgaaagcaaacaaaaataccaaaacgcgtaaaaaagaacaaataaaataaaacctaaaaaaaatctataaacaaatccgcgtcggcggcgcaaaatattgatcgaattttatatagtgataagaaggttttcgttctctcagactttgttgaattgattctaggcttaaatataaaaatactaaaaataagaaatcatatacaaaatatctcacgggatgaagaatttactaggattcgggattccactacttttcatgttcatggggttcataaattaatcctagacatttatagatcaaaaaaaagaaacaataactctattctttgccaaactagatttcataaaacattagttgtaagttgtgagcatgacgcatcaaaagtaattaaaaccaagcatgcaacatcaaacaaaataacaaataattaatagaaatcataaaaaaattaaattctatgcaaatagttataaaagaattattttaattaccacatgaacaaaacacagcctcctccgtcgtcccagtgatgggtctagctccgcatggtgaaaacacactcaaaggaatttttcattgctcaaaaaggtgtttacaaatgatggaaaaggtgagaaataattaacaccgggtttgtaacaattatatttgttacaaaccaaactgttacaaagaacgataaatatgaagtgtcgctggcactgtagcaatacgactgtcttctgtggtctaatgttcttcatgttctttttcaccagcaaaactggttcatctctgcaacttgatttttctccatcctcaaccctctgttcactcccatatcactccatatctcctctgcttctctacgtacaccttaaatagcctcccagaaccgaaaataatcctccataactccagcaaatcttccattactcggtattgaagaaaaatattctcgggaatattttcttcccctgtttcacgagattccgtgtatctcctctttgatcgaattgaaagcacctacatccaaaacaagagaaaatccgaccaaatatccatgagtttaatggagaatatctttccatgcacgtacgcctctttcttcttcaacacgagaatctagccaattttatccgaaaaaataagccataccatgtctgttaagaccagtcacatcatcccaacaattctcagccattgagtctctctaaaatgtcctcaaatctcgaacaaaaaattatgcaggtgagaaacaagtttcccgccaaaattaagtttcagatgaggaagattatggtttccccctatccagagtatgggcgcctttaacatccagggtgcctgggggtgcccttatccaaaatgagggtgcctttagtacttttccggggggtgccccgagcaacttctcgagccgaattttccaaaaatgtttatttctcaaaaatacctacaaacacataaaacactataataagtacaaaatcaagtaccaacaatacagaacattgaggacaaattagacacaaaaatgtgtctatcaatattcacatgagcataactcctgatactaaaacatccccaactgccgctgtaatcatttgactggtaatagaaataattgaaggagttggtatagaactactccaaaataaccagatgttacttttataattagctgaagcattgtgaatcaccatattttgcatacctgaaaaatttaatttactacaaattcaattaaagtgtgtaactttatatttttggttctgctattcacaataaagctggattcaattgaccgactgaaatgtgtaacttgtgatgggacctagctctcctaagaccccttatattcaaaaaaaaaaagaattctcattgtttaggttggaggttttttggacctcctttcccaacatttttcctaaaattgtatttccctgctgcttgaggctttactgctgaagtagtattagttgtttgaggatttttaccaacctttgttcctgttttctttccttcagaagttttaactactgaagaccaagtagtgaatgatactggctctatagtgactttgcatgatcttgcatccacaaatttaactacactcttctccaactctgttacttcagctatatgaataagtttttgaggttccatctcagctataatttctttatcaacacgaataacatcatcctcctacttctgctcagtttgatttaaagcactaaatcttcctccatccattttaacaagtacatgattagcactatgaataactttaagagttactatacttgaaaatatggaatcctctaccaactggttattaataatatttgagatgtgctcacctgcaccatttctttgtgggttatttggtttttggtactcagtttttgaccaaaaactgggtttggtctaacatttttccagcatttgcgtttggtctaaaaaccaacattgacccgagttgactgttattgaatagattttaattaactttataaaataaattagatgaatttacaaatagacccctgatgagggcttagcatctaacggttgtgatgtcaaaaatcaaattgtttatctttgtctactcttcatcttcccaacaaaggaaaagaaaaaagaacagacaaaaatcagagtgatagttatgagttgctattgattctcaagctatctccttccctgcgcatcagcttaacacatgcacataactggtactcattcaaaattctaacatttatcaattacaaccattaacaatcacaaataaattggcaacagctgctcatccttggctgatttttggcgataaaactctaccagataccaccaacaatctattattctccaccagtaacagtaaacaacaccacatatctcgattctccttcgcagcgacaactcctaacagtaaacaactcagcttgcaatgatccccaacaacaaccgaaactcaatgtcataaatattattcacccatcagctactgattcctactaggcatcatcaccgtaccatctatacatcctctgaatcatgtaattcttcgagccttgtaccataaatattgggaaggttgaagatataatcaggcaactcatcagtgataaaattttcacatctacagctcaatggaagcaacaccatctcaaatctgatccataaacctacctcataaactcaaaaggaattcaatctcggaaacaaatcttttattcattcttcttttgtaatcgatcttctcaaattatcaaactcacggacaccataatctccaattcagtcatctgttaccatcttcttccatgttctaagcagggccggccatgaggcaaagtcagcaaagtttaactttggggcagcacctgcaggggggcaaaaaaaaaaaaatttcttataagatgtcttatgtcaaacaaaaagtaagaaggtctacatcatgattaaataaagatataaggatataaaagaagtgtgtatacgaattagagttagaatatgagttagttaacatcaaaaataagaaacgtttcctctctcgaatattttttctctgtcagcactcttttccccctttctttcacaactcaaaacagggatcataatgggaaaatagatcataatggaaaaatatagatcaaaaattagttgttgtcgctgatataagaagtgaagggagatgattggaagtggtttctggttgctgttagaacatgttttcaaaaaagtgaaatttaagttggatgctgaatattgctaagactaatgatgtggttttaaaagttgagttatgatgaaaacaatagatttatatcgattttgtgttctgcaggtgttgatggttgtttttagcttaggttaaaatcgtaaaacctcgcatctgatgtgacgtcactctgcaaggaaacggtgctgtgagtgttaatctctccaccggaatatttattgagccattaattatatttacatgaaatattatccagacttgcgaatgtagcaatcatcccaaacactctgtaaatttcggcacctcgccaatacaagactgactgagtactttcctgtgctatgttccccggcataacccttaatatcggtatggaatgacggatttatgttcactcgcagcggagtagcatgaacctccaagtaccaaagttaaagccatcgcacgaaatgctcatatggaaagcacactgcattctttatataaagatttttgtggcagcatacaaaatccagccaattattttgataactcacaaaactcataaacccgactgatttgcaaaatcaaggtttcgcgccccgtgcaatacactagaccccgctggtcgaaaaactatgcttagccaaactaggcgattaaatccgccacagcacactagaagtgtggccacgccctagcttgtcggctccacttctcatcgaccaatcaggtagctttaaatcggccaccgcgcactggaagtgaatccacgctctagcttgccggccccacttcccattgaccaatcaggttgctctaaacctgccacactcacacagaagtgtagccacgcccatgcctggacggtcttcttacattaaccaatcaggtttctttaaactcgccacagtgttgaaaagaaagaaatcgcgccagatggccgcaaagccaattggcttcccaaaaacgcgccaacatgccaaacggcatgccaaacattccaaacgcgcaaggcgaacgcgccaaacgcgcacatgccaaacgcgcataccaggcacacatgccaaacgtgccaaacatggccactcaccacatgaaacatgccatatatactaattagggtttcgaaaagccaaaccctaatttaggaaagatttccacaccaccgtgcgaaaatttcagtggccatggctacgccaggcgccaccgtgccaatggcatgcactaaccgtgccagccatgccgcaatgccgctgacacgcattaaaggcgccactgcctacggaaggtagccataatcgacggctatccttcctcctgagatgcaatctcagccctcaaagtttgccaccaaactgatattcttgtggcaacttttaggcaaccagccgcctaaattcagcagccatggctacgccaagcgccacttgcaccactatgccactagcatgcatgaggcatgccagccatgccgccaaaactttggccacggcaccaaaatcccaatttgtccacgacgctaaaccctaatttcggacacagtgccaaaccctaatttggtcacgacaccaaatcccaactttggccatgccgccatgccacaggcgcggatatgccacttatgcaaccgtgccaatggcatgcacgagccatgccttccatgccacaatactgctggcatgttctaaaaaggtcattgcgccattattaggcgccaacataaggtagacataatcgacgattacccttcctcctgatatgcaatctcagacatccaagtttgccactgaactgatagacttgtggcaacttttaagcgaccggcctcctaaatccagtgtccatggctatgccaggatccacttgcaccaccattccactgacatgcacgagccatgccgcattgccagtggcgtacaccaaaacgccactacgccattttcaggcgccaacacaaggtatccacaatcaatggctacacttattcataagatgcaatctcggccatcgaagttcgccaccgagacggcaagatcgtggaaagttttaggcgactagccaagacgagcctaatagcatcacatgctatttacctgtggaaagcctatcaattttaacttgccacacttagcaaagtgctacttgttttccacgaaaacactcgagacatcaaaacatgtcacaaaatggaggatactcatcagggtattggtctggcggtttacagcgtgcgacgtgcaatacgcccgttacaggaaagtgtcataaagcggggcggttattaatggtgtaaatgtatctttcattatggaaacataaatttcaggcgttacccgttactcccttcttccattgctcaatcgtttacactttctacgagaccagggtacgttttgttgcgacttgtataaataggtttcacctatttccaccaaacaacaagttttggtcaggagaaaaatacaacatccagaaatcatctgatagcttttcatccagctagccaatgaaactttctgatacaagtctcgaaacacccacacttccggaatcaactattctggtctcaacactttcttcgcttccctccctaagaacaactcttctccttcactttgtgactgaagcaatcctggaatgatcatttcttggtttaggccaggattttacagattgatctctcgaatcaaaagtactcccatgcactacattgtttagggtttagactagtttctcttccacacacacgaaattttcaaaatcagcagaaacggttttcacccataaacatttggcgaccacagtgggagattaatctctcgtttacaatatcaatttccaattcccaattcccaatttaatttttttcaaccccgatctcaagatggtagaactcaggtccggatcaccaaaaaccctgaaaacaacagtgctaaaatcatccttggtgttaacgttccttccactggcattaacacgccaactgccaataccagcggcgcggaaaattttccttcaggtgttacacctccaatcaccagagccagagccgttgcttccacccccaatgtttcttcatgtgtgacagctccaaccgtcaccagagtcgctgctactccactatcaggacgagagactggaagatccagaagaagccgatcttttcttaccactgttgttttgatggaaagacaaaaggttctcgtaagggtccgacatacatgcctacaactcagaaagatatacctatattcctcaagacactaacggagcgactaccacgagaataacgtcaaccccagatggagctgacaaggaatacttttaacatccggcgcagacacttcagcaggacgcacgtttatagataaagaggattgcgttgctcttgaatgcccagtagaaaggaatcaacaatccaatttcatcacacgtgaatatcaggaatgacttctccaaaatcgaggcaaagaaaatcagcaaccctctttagttcacagagaccctctttctgtttgcatgatttctgggaacttcaccaaaaaaatcgtgcagtctatgatgaaacatttatgtgagattatgtattgtctccaaggtgcatcgtcaaggcatatttgcgaacctcaaccgcactgcatcaggaaagtatttgtttccatccagggaagccgttcccaaaccccaacctctcctggaaaccacgattgatagatggaactggggactcccaacctctgttcgcttgaaggatgccgagtttgacagcacgctgattgacgcggcctccaacttcaacattgtaaccgtcaaggctctgagagttgcgagggaaaatcaaacagaagaagcgtattctttcccatggggataaaaacacgacttgccgaccagcactatttgtgccgtcttcccatattacatatcgtatcaagtcgtttttcgaggtcaagggttaatagcgccttcactggatttctccagcagccgctttgacattcctttccaggagccgcttcaacgttctctctagaagtctccccgcttcaatgatcgttccagcagccgcaccgcttcaacattctctccataagctgctccaggatccgaagcagaaacttcagcgtttttctccatagaattcaacgtcctctccaagagctgaagccgcttgaacgcctctttcctgacaagaatcatgtcgtagcctccacactcctccctgtcaaggattgtgattacagccatccaaggttcgtagttgtgtccacattttgatccatctcgccaaaccccgtggtcatggacagtttactcgcttacgtatccagccaatccctttgcttccatggacgcccatgcaattccagccaacctattttggttcacgcgacgatgtagtcccttatgatcacatctgctgccaagaaatgttgctgctcgttattcgataccagccagagctttaccatagcaacaaccattacaaaggtaatccatacttctccatattttagtttcacgtggaagaagtaatggagtcgcccgtacggatgcaagatgatatctttatcatggtcaactcaccgaccatacaagacggaaacatgtaaaccacacctggggactgaggctctccacgggatcccttcactatcaaatctcagaagacacggttaaccaaaagtcaaaggtgtaacgcaagaatatcatcacctctttgtatagaaggcgcctgcaacactttacgaggacgcagcggatcccaagcctagtcagagaaagcaacttcagtaaccaaagagaagtgcgactagggactgcttatcacggtccatccccgacaacaataaagcattcatgagataactccagcgatgcggctgaaacatttttcttgaaaatacagagggagccacaattaacgatataactctctcacttctacctcatcattatccagaatatttcgtccatgtgatattccaagcatcccagcatcacatctaggggattatgataagattatcaaatcccataggcgtggattcaaggcgacgtaattaaattaggatacaattggggattgaagcctcattcatgtttagaagcttaaacgcagtcaccaccttaccagtgaatgcagcagaagcacatcttccacgagaaaataggatcagggtaattacacaaccaggttacttccgatttcaacatcgtcactgtcgaagttttacgagccgcaaaaatttctcaacatgaagccgtacacgtgcatcaaaaaccccaagagcacgtcacagagatatattcacatatccatccatgccatcggatctaacagaagtataactgggaacttctaaccgcatcccactccatacaataatccaagattccgaagatggttcaaaggatgttgattggaatgaagtcccggtagcatcacatcggcgacggagcgactctcaactcatctatttcgcgcccaatggttccagaagattttgaccaacaacgcaaccacaatcgccgagattagctctgacataattccatccatccatcccaagagtgcaatggagtttggtacattttgaagtcaactggagaggtcagatactcattcttctggagtcggaaccttattacacattctggagaagatcattgatactgttgggtggatacatgcgagagcacctaccttgagttctcttggctcgccttgctgctgattatagctattggagattactttgttaccattaatgctcgctctaccaccgctaacaaatgacaaagaggatccagatactgcagatgaaagcatggagccgaacgaacaaaaaacagaagagggtcgatacccattttcatatgaacgcagtttctagaatttgaacagaataaggattccttacttctccatgaacgagaatagatgactgggcgcactacactcatgctccatagccgaacaagtagtgtgccaatatctccgctccatgaccgaaccagcagcgcgccagcacgaagaacaccagtctctcaacctgcaactctccatggctccagcaattcgcagtcaagtcaactctccatggctctagcactccgcagtcaagtcaactctccatgcctccatcactccatggtcaagcaaattctctatggctccagcactccgtggtcaagccaaatctccatggatccatcactctgtggttaagttaacgccaacgctccaatattccgtgatccatccagcaagccttccaagtgccattttcaccatttcatggactgaagccagtttccaccatctcgcggactgaaaccagtttccaccattccgcggactgaatccagtttccaccattccgcggactgaaaccagtttccaccattctgcggacagaagacagtttccaccattccgcggactgaagccagtttacaccaatactgaagaataagcaaaagaagaaatatcgggataagtatctgaaatatgctcgccttctttgctgctactgctttgacgctaacaccaagacgtggcaataaaactgatgatacgggataaagaagatgggaaacaccttttataggcacgattttttgagagtttgaatggaggaaggtttcctattttttgttacacatggaaagaggcaacctgaaccgcgctagcaaggctccatggcgccaacaagccacggccaagctagcgccaagatccctctcgtaaccagcgccatctccgcgtcatagccaaaccctaaccagcgccatcctctccgcgtcccagccagactagcgcccgccgctcctagccaacaccaacagattgcatccttccagcgtcatcttctctgctcgatagccaatgcaacaacaacttgcatccttccagcactagcttctctgcgtcctttccaacgccatcttctatgccgaggccaacagtcagctctataatcgatgcaaacagcctgcgtccttcttaaagccaacttctccgctcctgacaagcgccacgcccaagacgatccaagccagcagcgccatggccaagccaagccaacagattcacgaccaagaaaagtcagcgtcacgtccaagcaaagtcggcgccaacagctcgcgccaagccaacaacgccactaccaagctagcgccaacgtctctacgtccaagccgatgccaacagtccgcgtcctagccaaaacaacgccatcttagacgttcaaagcggcgccatctatctttcaatagccagcagcgccattcacctttccgtagccagccaacgccagttcgtcggaccaagtcgcagtgccaaagacgcagcactgatgccaacatcccatggccaagacgaatttatgcaaaagcctccaaagaaaaaatcacagattcttcatgccccctgacaaaggttagttgaatttccctggaaatctctccacgacatgctctttcgattttactctcgtccgtcaccatctcatgcttaccccgcaacaattccactgttacgtgctaagcaggggaattaatgttgatggtggtttttagcttagggttaaaatcgtaaaacctcgcatatgatgtaacgtcactctgcaaggaaacagttccgtgagtgctaatctctccaccgacatatttattgagccattcaatatatttacatgaaatattatccagactggcgaatgtagcaaccatcccaaacactctgtaaatttcggcacctcgccaatacaagaatcactgggtactttcatgtgctacgttccacgccagaacccttaatatcggtatggcatgacggagttatgttcactcgcaacagagtagcatgaacctccgtagataaggatttttatggcagcaaacaaaatccagccaattattgtgataactcacaaaaaactcataaacccgcacaatacactagaccctgttgatcgaaaaactatgcttacccaagctaggcgattaaatccgccacagcgcactggaagtgtggccacgccctagcttgctggccccacttcccatcgaccaatcaggtcgctttaaatacgccgcaacgcactggaaatgtgtccacgccctagatttccggccccacttcccatcgaccaatcaggttgctttaaatcctccacagcgcactggaagtttggccacgccctagcttgccggccccacttcccatcgaccaatcagttcgctttaaatccgccacagcgcactggaagtgtgtccatgccctagattgccggccccacttcccatcgaccaatcaggtcactctaaacccgtcacactcacacagaagtgtagccacgcccatgcctggccggtcctcttatattaaccaatcaggttgctttaaactcgccatagtgttgaaaagaaagaaaccgtgccagatggccgcaaagccaattggcttcccaaaaatgcgccaacatgccaaacggcatgccaaacatgccaaacgcgccaaacgcgcacatgccaaacgcgcataccaggcacacatgccaaacacgccaaacatggccactcaccacatgcgacatgccatgtatactaattagggtttggacaagccaaaccctaatttaggcaaaatttccacactaacgtgccaaaatttcagtggccatggctacgccaggcgccaccgtgccaatgacatgcactaaccgtgccagccatgccgcaatgccgctaacacgcattaaaggcgccactgcctacggaaggtagccataatcgacggctatccttcctcctgagatgcaatctcagccctcaaagtttgacaccaaactgatattcttgtggcaacttttaggcaaccagccgcctaaattcagcggccatggctaggccaagcgccacttgcaccactacgccactagcatgcacgaggcatgccagccatgccgccaaaactttgggcacgacaccaaaatcccaatttggcctcggcgctaaaccctaatttcgtccacagtgccaaaccgtaatttggtcacggcaccaaatcccaactttggccatgccgccatgccacaggcgcggctatgccacttacgcaactatgccaatggcatgcacgagtcatgccttccatgccacaatgctgctggcatgccctaaaaaggccattgcgccattattaggcgccaacagaaggtagccataatcgacggctacccttcctcctgagatgcaatgtcagccatccaagttttccatcaaactgatatacttgtggcaacttttaggcgaccgaccgcctaaatccagtggccatggctacgccaggcgccactttcaccaccgtgccactggcatgcacgagccatgccgcaattccactggcgtacaccaaaacaccactgcgccattttcaggcgccaacacaaggtatccataatcaaagaatacccttattcataagatgcgacctcggccatcgaagttcgccaccgagccgacaagctcgtgacaagttttaggcgaccagccaagacgagcctaatagcatcacatgctatttacctgtggcaagcctctcaattttaacttgccacacttacaaaagtgctacatgttttctacgaaaacactcgagacatcaaaacatgtcacaaactgggggatactcattagggtgttggtctggcggtttacagcgtgcggcatgaaatacgcctgttacaggaaactgtcataaagcggggcggttagtaatggatagatgtaatggtgtaaacatatccttcattatggaaacataaattccaggcgttacccgttactcccttcttccactactcaatcgtttccacttcctacgagaccagggtacgttttgttgcgacttgtataaataggtctcaccaatttccaccaaacaacaagttttggtcaggagaaaaatacaacatccagaaatcatatgatagcttttcattcagatagccagttcaactttctgatacaagttacgaaacacccacacttccagaatcaactattctggtatcaacactttcttcgcttcccttcctaagaccaacccttctccttcactttgtgaccgaagcaagcctagaaagaccatttctttgtttaggccaggattgtatagattgatctctcgaatcaaaagtactcccgtgcagtacattgtttagggtttagactagtttttcttccacacacacgaaattaccaaaatcagcggaaacggttttcacccataaacaacagggaagaacttcatttaggtagtctccttagtgcagccgtcacctaaccatcatcagttgcaagatacacattcagtgcttgacaaaatgccagaaccaccaggttagtacgaaaatataaatgtttatttggtttgtacaggtaagtaatttataactttatatttcttaagaaacacctttatagtgtgcttttagcattaacaatgtacaaccactagaaagaatgggcatatatgcccgtggaaaccattgttttataaactactgaatgagtgagtttattgttgttttgcctctcttaatattaaaaatgttatttcttgtagagatgtcttgcgggattgttactggagagagacaagcaagaaaagtaaggaatgcatatctataatctgtactgaaacaagatattatattttttgtaaagaaaagcacacccgctgaagtaattgtcatcttgacttgtgacaccatacatgttcatggtgaaattggtaaaaagttacaaattcatacaagtcgcaacgaattaaaagttacaaattcttacatgttcattactgattttgcatctaggtttgtaagaagagtcatttttgaatagatggtaatctgttttattactcgaatcgaatgaatttttattattattggtttttgatcaatgttatatgtacaattaagatattagacaagcttttggaaacatctggcaacacaatatatgtatttacaggcttaatcttggcagaaaatgatgctaatagattataaaccaccttatgctcctgattatagtttgtttatgtaagagggcaacattttttgagtatgctttggggcagcaaaatttcagggccggccctggttctaagaatcaatatccttaatttcaacacaaatctatttcaatctctcacccattgtgtaattcgagtaacaaacaccgcaaccttcttcttccattttgaattaatcaaatcctacatctcaatccaaaccctaatatcacagcagtactagatccaattgcttcttccattttgaatcaatcaaatcctacatctctaatcaaaccctaattttacagcaatacatccatcttctacagctaaatcttcactaccaccaacttcagaagcaaacccatttctgtcttcaattctgctcaaaagcaacatcaatacaaacccaacttcattaactctaagaaattcaatatctcgagcgtccaatatcacaatcaatagcagtcacaacttgtcttcttccctgtcttcgatattaaaccaaactcaaaaatcaatcaacacctccgtgttcttctcagattataagatactctctttcctgaggacacgacccattgagatcctaagtttgccggcatgaggaactggtgcagagcaagaaatagagaaaatagagaactagtggaggcgatacataaaagaagggtgcaaatatcttacgtaaatgtgcaagaaataaagggtaaaatagtatatatatatttatataaatatatactgataataaaattaaaatcattaatatttagacttaactgggtcaatggaagtcaacgttggtccttagaccaaacgcaaaggctggacaaatgttagaccaaacccaggttttggtcaaaaactgggtacgaaaaaccaaataaccctttctttgttattgtaattttcttcaatttcagacctatcacaaatatcaaaaagaatatgagtgataacagttctaggagtatgctgttgaataggaactaatgcttttatgataatgttgatattttgaactcttcctattggatgaaccttgttttttctactctgcattcagtgataagatgcccaactatcttgcaagtagaaatttttctggacaaactgggattgagatgctctgaaagaaaccaccatatttagtgcctatccaaattttatttggaatagttttggcaaaatctactttaacaagaacatttgcataatatccaacttcacacttagttgttgcttcatctagtttaataggatttccaaattctctgcagattacaaacaaaatcttttcactccaaaattcaagacctagccctggaaatctaacccataccatagctttggaagttctttgactttcgggatgaaaattcgagatccaattcctaacttgtagaacttgatttgtaacttccaatttaccttccttgatatgacggtcaatctcattatctaacttaattgtaaagaaaccccttcctaatggaattagtttacaatctccaactaattttcattgttgacgaagaatgataacaacattaacaaatttaatcttttgtaaattcaatcttccaataagagaaaacttccaaggatttaaactctcttgaaataaatcatcaggcaattcaattgatggaattatttgcgaatttgtttcttttactaaaacctaacatatcagacattgttgcttcaacacaggtagttttaggacaagaatccatgaaccacctgaattaaaagctactaatcatgagaaaaacttggtgcaagaataaatttgggtagattttcacttgaaatgaatggatctgaacacgcaaaacgtaaattgatgttcgaaaatttcgccgagtcagtcgtccgatttgcacactcacccgattttttttttttaaaatttaactctagaatcctttgctcaacaaagcttatatttggttttttgctttacaaatattttacatgctccatgaatcatgataagcagatctatgcaccaaccattttacatgcaccacgccttcatttttcattacacaccctatttatcaaaaaaaacttcactataggttgagataccgtggattttgttgccatggcctactataataaaccaatccaaattttgcattccttggcatgcatacaagaaaaattccaacagacgcaggaacggtatagacggcgtgaaccagaaatgtctgtcaacacagtctcttacactttggatgtaagctaatcaaaactacttgcaaattgtataacgattacgcacgcccttgctctattgatcaacattaaagccacgcaagcctaaaattaagatcaagaaacatatagagagtgctctctcggggtcttcagatgcactgaaatttaaaaacatacaagatagagcctattcgaccagggtcagtccatgaggaacatcggtaaacgtcactggaaatatgcacattcaaaataaaaaaactatatgctgagggaaaaaatgggccgttgacggtggtgatggtggtttcgcccgccatcactagtatttggaccttcaaacatccaccagcactccattaattttcatacaaattcagaacatagactgaacagaaactcgaaagaataaatcttagaccaagaacatcgacattaatgtgatatattgatatgaattgtgttcaacttcaaccacaatacaagatgaaaaagaaactactgcaacgttcaaattttccaacagcatttgatgcatgttattacaattaatccaaattggatcaaaattcagaaaacaacttaaacaaaacactcactcgaaacagaaagaatccacgttaaggatcaaggaataaccgaagatccatcgacgtaccctgtacgtacttattattcgataagtttaaccagaggaaccatatcacttcattgaagaagccagtaccaggatgaagaaggatccaatcatcatttcttgatgatagttcagaaaatacttaaggcgcttcaattcattctctaacgctttcctttcgttgattttttcatcacctaacctgaactgatggattaagtaatccacataatttccgaagataaaaccatctgttgcgatccttgccggttccccgacgcaactgtgtatcagttctttttcttcttctacacatctctctatttcggcttccttaagtgcaatgttattcttcaaataatcaatcatctcattcaacatctctgattgcagatatgtttcttcatcttgatccttagcaccaatctctgcttcagtagatgatgatgtccccgcccacatagtactcgattctttctgattagcatcttcatctgcataatcataataatcatcataatcatcgtcgacatcatcgtcatcggtagtaatacttgattctccaaatttagatcttttatataaccagttcatattttcatcctctgaatcatcagaagatccagaacggcttatttgttttcttttcaaatcagacgaaatgcctttttctgcgtccattgggatagcgatttttcttctgattatgagaatcttgattttttggagcgagatagaaaacagagatcaagagcaatttgattgtgccatcgctgtaatctgctagaaccaaccataaaaggagtctatttgtagtggctgaaacgattgccgccttttcctttcaaacgacactgcttttggcgctcgggtcttttggacatggggtacgacgttccatgaaaaggcacacatactatcactagaggcagcctacaaagaaattaagagcactcaaccaactcgagagatgaaaaagatggagacctagcccgaggacgtgacatgtattgtgtgaaccacaagatctggcgccttcccaaatttttgcttttcattcacattttttttttttaacgaaaaggttaaaatgtagccaatgagaaaatcattcacaaatcatcacttggtgttacacctgccatccagttaaatacgatggtattaattggcaccaacgaaaagtgtttccatgtgaggactataaaattacaaaatatttcacctttaaatcaaatttgtactcggttttgatctacctccaaaacattttgtaatttttttctttcctaatgacccacgttattacataatgtaggagatttcacagttttcagttttgaaatgtaaaaccgtagcatgtacggttctgttatcggttccggccgaaaaccacaccgaccaatcgttgtacggccctaaacaagactatccatagaggaaggaaatgagatccagatatctttacacagtattttctatctcggcaagccggtctgctagattatttttaacacgctttatatacacaactttaaaggaacgataattataaagtaaattccgatttaaggcgttgattacgggggcacatgaaatattcttgttagcgagatccattttgagcccatttcctcataacttggggctcacatgaattcccctgtgtttattgtcacttgtgtagggacaaaaatagctaggcttattcacgttggcttcgaaaaaatgctaaatttgggattataaaagcattttgtagctttttcttttcaacaaaaaaaacgcatttagggaagctttcggtatcctttgctgcaacgatacttttatttggattctgatttgaaaatactttacaatgcccccatgattaacatatctccgcaccaaacttctacatgcaccatccatttattttttcactactttcttttatcagaaaattcttctattgttgccgtggctagacacgaaaagcattcacggcgtgaaccggacaagcccgtcaatattgcctggacaatcattatgttttcaagaccaaaaaacataattaaggacagtacttggggactttaaatgaaatttcaaaacaaaaacgaaaaagatagctacctaatgtaactacttgaaatccattagcacacccaaataaaaaacgaaacagatctaaaacatggtaagagttttggataagaaattctttattgattaaccattccaagtagtgaaaaatacgagttcttgaatactaggaaaccctaatctcttattctaagcaaagctctcccctttcccaagaatccgacccctcatacattgcccaaggacccctatttatagaaaaatcgaccctaatggcatacaactcattttacttcgtctggatctcgtggagatgctttatacttcgcccagatctttcccttatcgcttcgaccctcttttcctcgtgaattttcgccaatggtcaaggtgatgaccaaggaatccgtgtgcgagattaacagatctccgcaccaacattctacatgcaccatccatttatttttttcccgcgaaatgcgagcatcgttgatgaaagagagtgagtaatgacgtggcagagaaaccaaatgcgattttttttcagatctagtttttgaatttttctcatggattcgtctcatatttctttctgaaattgatccaatgattatctcaactcaggtctttgatattgaatcaagtattgattcgtctgattttccttctctaatcgaatcatacggttctaaggagggtagttctctaaaccctaaaaagaatgaaaattatcagagggtcggtgatgatgttgataatactctgatttctaacaattcagagattgtttcaccagggaaagaggttagagacatcaattctaatggaacagttgggtctccttcaaaagggggttcttctaaccctaactctaaaggttggagaactttgtttccttctacacaaccaattactcctcatcctcctatgaaattattttcatctactgagctaaatggaaagaaggaggtagattatgctgcagttgatttctcggcaggaattaaacgttgcgaagaatatgtggtgggcttctgtgcggggaaaagattatcttttccagcagtcaaaaaagctgtagacaaccattggaaactcaagaatgaggtgagcatcaaattacatggaaattgtgcttttatttttgagtttaaagatgacgaggatcgtagaagagtttccgaataaggatcttttttacatatcgaaaagtctttttacagtgagaccatggtcgaatttgctagaatcgtcaattgctagcatcaagttagtacccatttgggtgttgatttgtaatgtgcctctgcacatgtgggatattgacggattaagtgttatctcaagtttcataggaaagcctatattagtggatgattaaactctaaagaggacaaggctatcttatgctagagtttgtgtagagatagatgttgacttcaattatccataaatcataccattaatgatagatggaaagatttctttagaaatgcccgttgagtatcaatggaaaccacctaagtgtgaggtatgtaaggtttttggacattcctctaaaaactacacaaaaaagttgaaagctagatggtcttctaaatcaaaaggtatgggaattcaagatggagacaaaaatcatctcaatgcacctatcaatgaccatcagctgtctattgtggatggtagaagcgtagatgggattgaaacggttgatccaattgttgtctctattgcaaatgagagcgcaacaattgatccaccccttgtgcttgaacaaccttcaacaacaaatgagaccaatgtcaaagatacaagtagagtttgtaaaaaaaatggatggagcaaaagtggaaaaggaaattcctataaatttaacttcaacatatgcagcatcggaaaaggctacagataatgggatgattcacaaacctttctatttgcctagcgacttgccttaccaatggaaagatttgtctgacaaggctgcccaagctacagtaacaaagtcagatcaagttaattattcaaagtgtccggtcaggactgctcgcattcagaagagtggggaagtgaaacataagctctttcttgtaaagggacacgacaactgggagacagcttcaagtcggaaatctccaactaagactcagcagagtggtgaagggaaacataatccctttcttgtaaagggactgggaaattgggagacggcctcaagtaggaaatctccttccaaggttgttgcgcctaataatgatggtcatatcaaaactaggagcatcgacactcctgtcaaagtgaataacactttcaaagtgttgagtaatgtacacaattctcaagttgaaggtagagttataatagaagagtaccaagaggatagtgaagaattttatgatgtagaagcggatagatatgctcaacatttggcttgtgaatacaaaactagtaagaaaatgaaaaaagaatgttcaaggcttaaatggaatggtgaaatcccaaatgaaaacttcggtaaaggccaacgctctgttgctaggaagcgtaagtaacttgtattttccttttggtttttcagcttagcttttagcctgctgaatttgctttgtgcttgttttaggagtcggattttgtcgctcttttgtttgagtttctctgttgtcggtgctggcgttgccttccccgttggaatcgcttaggcgctcctatactttttatgtttctttttatcatcaatatattctcaaccttttaagtaaaaaaaaatccatttattttttcattactttttttatcagaaaatttttctattgttgccgtggccagacacgaaaagcatacacgatgtgaaccggacaaccccatcaatattgtctctgatatggacaatcattatgttttcaagaccaaaaaacataatgatgcagaaagctttcatctgcacaactaattacttatgtaggagacagattgtataagctttcttctgcaacaatctcctaagcttttgacaagggaaatcctgaacttagttttgatttgtataacgatagattgttgcattacttcaattacaactctattgtagcgcaagaatcatgatcataaatgttctcccgattgcctccggtcaaactacctagttaaagttcaaatattctagatctcaatcagtggagaacttgcattgtgtttccaagttatagaagctactaagaataagagggtagttgtgactgcatacagaaatattggaactatatacagggtagttggaactgtagttgttactgcatacagaataagagggtagttttgaccagctctcaatgtcgtcgtgtctttccccttttctctctgaaacaaagaagaagaagaagaagaagaaaaaactactttcttccaaaactcaattccttgatccgtccggttttgatttgatttttcagatctaccggacagatcgagtttgtgtccttgtatatattaattttccaacaaaaaaaattatttctaaataatttttacggttttctgataggtctaatggtttcacaaaattatcaggacctgttttcatattttctaattaggttattttggtgggtttggatttgcattgctctggaagaaaacgacctacttcgtcaaatatggagatcgtttctaaagaaattaatttgggcatattacttcccttttatggaagcatctgatcatcaagaaacaaaatggtttaaaaccattatacggattttcaatccttcaaagagctgcagaagtttaataggattttcatatttcgtttctttaagttttgattgtaaatcttgtaccgtctgtgttttcctgttcattgatgtaattgatcaatgtaatccttctaacctcaatttgaattaggttttctaataaataaaattttgggttttcttgaagcccctttttctatcaaaaaaaaaaagacccaaaaacataaggacagtacttgggggacttcaaatgaaatttcaaaaagaaaaaaaaaaaaagctattctaagaggaaaaaaataggtcattgatggtggtttctccgtcactatttggacctccaaatatccagcagcacatgtcatacaaactccaatataataaatcatcccacaaagttcattcttcagttcataagatatcctataactttcttgcaaattcagaacataattaaatcgaacaaaaactataagaataaataatttttaaaccaagaacatcggcgctaatgatgaattgtcttcaatccacaatacaagatggaaaggatactgctaacgatgtccaaatgttttcaacaacatttgatgtgttttattacaattaatccaacatggataaaaaattcagaaaacaacttaaacaaaacactcacttcaaacaaaaacatatcgaaagaatccacataaaggttcatgcaaccgaagatccatctacgtactaacccgtacgtactttagaaaatatgatatcaaagacttaatgaacacaattcgtaactcaaacaaatctcttgtattgatgtaaataaactcatggcttaacagcctatttatagtttaacaaacttgactctcaagcaaagactctttcctaacaaatcaaattctaaaacaagactcttctagaacattctaaactctatacgtaaaatactatacgtaaccaaacattaaaattggcaaaattgtttctcaagtttactacacgttcacaataacgcgtaatatcttctactgattgtttccattgatgacaccaacttccactggttgctttcactcagacagtagcaactccacctagttgcttccacaatatcatgtcaacttctctaagttgcttcctcttaacagcatcaacttctactagttgctttcaaaaaatatatcttggtttaatcttcaacatcctctcttaaaccaatatattatttactaatcattccaagttttccacgcaaatagatgaaggtattagacttcaaagacctggtaaaaatgtcagccacttgatctttactttcaaaaaattcaacatcaatctccttattgctgacaagctctctaatgtaatgatatttgatatcaatgtgtttactccttccatgaaacacaggattctttgttaatgaaattgaggacttgttatcacatattattgttgtaggtgtaatattctcattgaaaagagacttcagcatcatccttagccatacaacgtgtgtagcacaatttccaacagctatgtattcagcttctgttgtatacaaggcaacaacttgttgtttctttgatgaccaggaaaagaatcatgttcctaaaaggaatgcataaccagatgtactcttccttccttttgtgtctccatcccaatcattatctgtataaccaaccaattttggatcttcagaaattgtataaagcattcccaaactaattgttcatttgacatacttcaaaatcctctttgcaacttgtagatgtgactgtcttggtgactccataaacctactaactaatccaactgcatacataatgtccggtcttgtagaagttaaatatctcagacatccaacaagactcttaaaatatgttgagttcacaagttctcctgattcatcttttgttagcttcaacctttctttagttggtgttaaaattggattacaattatccatcttgaaatgcttaagtattccttctgcatatctctgttgattaataaagatacctctttctgtttgttgtacatcaatgccaagaaagtatgacattaatccaagatatgtcatctcaaactctttcaccatatcctcccagaattccttgatcatctctgagttatttccagtaaaaataagatcatccacgtacaaagaaactataatatgatttccaaatgaatcatctttcaaatacagtgtatgctcatgtggacatcttgtaaaactttctcaataaagtatgaatctattcttgtataccaagcacgtggtgcttgttttaaaccatacaaagcctttttttagcttgtacacttgattctccttaccctccataacataacctgctggttgctcaacatatacttcttcttctagtacaccattcaagaatgcactctttacatacatctgaaatatcttccattgcttctgagcagctagagcaatgatcattcgaactgtatcaagtcttgcaactggtgcaaagacttcaaaatagtctattccttgtttttatctatatcctttagcaactaaccttgctttcaatttatcaacttcactatctgatttttactttgtcttgtaaacccatttgactcctattgatttctttccttctgtaatttctgtaagttcccatgtattgttcttctttattgagtttatatcagcttccattgcttgtacccatccattatctttagaggcttcttcataaacaacatgatcacaatctccatataaagaaaaattaatctcctcttcatcagtatcatcatctcttgttatcacataatctttcattcttgctggtataacatattttcttcttggtcttgctatctcttgttgtggtatcacatcagttcttacctcttcagttgttgcttctttagttcttctttcttcttgttgtttaataacttcatcttgagtatttatttgttcttcaactgctaatggaactattctgacattttctcttgttgagctggttgcattccaattccactgagagtcttcatcaaagattacatctctactaataactattttccatgttacaggattgaaaattttatatcctttggttactgaactataacctttatcatttagcttatttctaagtttttttggtacatgtgcataagcaatgcacccaaaaactctcagatgtcttacacttggtcttgcacctctccaagcttcttttggtgttttattattcaaaatatttcttggacatctattaagtaaatacaatgatatatcaactgcataactccagaagttctttggtaaatattttgttcttcttatagttcttgccatctccattattgttttattctttcttttctgcaacaccattctgttgaggtttatatctagctgttaattgatgtagaattccatgttcttccataaaactatcaacaactgtatattttgttcctctatcagttcttagtatcttgatctttccaatccgcttctccgcatatgctttaaaacttctaaaagcatgaaaagcatcacttttctgtctaattagatacacccaagcttttctactaaaatcatcaatgaatgttatgaaataattagtacctccatgtgatgttacttcaataggaccacacagatcactgtgtacaatctccaattgttgttctgctcttctagctttgttcactgggaatggatctctgtgttgtttgccaaagatacaattttcacaccttgactctggaatctctataatgggtagacatgtcaccatctccttcttagacaatgcttgtaaactgttaaagtttacatgacccattctcttgtgccacaaccaactttggttgctttcatgtgtattataacaacttgcactttgatattgaatattcaaaggaaacaatctgttcttagtcacctatactcttgtaatgagtcttctatatctatctcttattgaacacactccattgaatatgttcatagaataacctctttttgataattgtcccatactcaacaagttctgatgtaaacctggtacatagaatacatccatgatatatgtttttgtaccattcttaagaactattccaattcttccttttcccataactgaaatggtagaattattaccaaacttaacagttgatcttatggattcaacaaggttatcaaacagatattttcttccacagatgtgtgttgcgaatataatttcggtaaataagaattcgttgctcggacttgaatagattttaaaacgaaaatatatgtacaaatttgtcacaagatgttcgagaggtattgggactaaggacttggccaattcttcatgcatgtggtatattttatttattcttaacaattactgctcaaaacataaatatatggactcttattttgccaaaatagattctcagaatattagttataaatcgtaagcatgggacatcaaacatttaagcaagcattccgcatcaaataaaatgataactaattaattaaaatcatttttcaattttttaatcagtgcaaaagtcataaaaagaataaattaaatttaccacaatgacgaaaatagactccctccgtcgtcccaatgttgggtttagctcctcatattaatcataatctcaaaatgttttattattgctccaaagttgattacaattgagtaaacaatgcaacagagaaatcgcaacagaagtttctgttcgaagacgatgtcgctgcgttacaaagatagaattggtgaccgaaacttaaatgttgtggtgtacttctctgttgcaaaataggatgaagcaactgttgctatgacaatattggttgcaaaacaggatgaagaaactgttgcgatgaagataaaggttgcagagcagttgaagaaactgttgcaaatggatgaaggaaccgtggccgattccttgttcttcacgggcaacaacagcagcaacagagttctgaaaactctgatttctgctcctctggccctcctttcgactcccaactctcgacatcccttacctgtgatagtagcaacctatttatacacctaagcctcattgaatctctccataactcctcaaaaatcttcacaatgaagaaaaatatttttgagaataatttcttatttcttcctctgtgtacgttaattgtcttggaaatcttcataaactgattgatacgcatcctaggagaatatctgggcttaactacacaaacatgcaacatcttttacgtgattttctttccaaaaatgaaacgatattcttttctctgttttgatcgggaattgattttctggacaaatttgatcgatcccaaccaccataatatcttcatctactcatatcacatatacccattaagtctcagctctttaatctcgttaaaacaccttcaaatgtcgaattgaaaatctgccagtaaaggaaagaattttcccgccaatttcttttgtttgattttttttttaaatgtggttgcccctatccagagtaggggtgccgatagtaatttgggtggaaatagtaatttttctgggatcctccggtacatttctgggacgcttccggtgcatttatggggtgccttcggtacatttctccggggtgtaaatcatcactttttgagcaactctttccacataagggtattttctccaaaaacacctaaacaaacataaaaacaccgtaataagaacaaatgggtactaaaaaaatacacaaaagagatgaaaatagacacataaatgtgtctatcaatgtgattactgcaacctatatctaaataccacttctgatgaagttgttcttcagctgtgtgacaagctagcaacatattctcatctttcacttcatcttcttctttttcttcttcttgtactatgtttgccttgaagtttgatttataattattagcagttgtccttctaggttttgtacatgtagtagcaaagtgtccaaaaattcaacaattataacactgcacctttgataaatctattggttttcttccttgataacctacattattaggtcttcctccaaaacttgagtttccttgtttgttactccatgtgacttgactttgtagagcttcttctactggttttgcagcagttgtttttcacataatctctgctcataagcctgtaatgaacctaataattcattgagtgacatagttgcagcagtgttacactcctcaatagcagttacttttgcttcaaatttatcaggtaagcttcttaaaatcttttcaacaattgctgaatctccaatagtatcaccattaactttcatctcattgacaagatttaatgtctttgagaagaattctgatattgttttagatgaatccatctgtaacagttcatacttacgcttcagagtttgtaacctaactttcttgactttgtcagatgctttgtaatagtttaccaatccatcccatgatgctttagctttcttaatatagataactctatccatgagagattgatgaactccttgatgaagaatataagttgttgtagaattgttcttcctgtttgctgttaaagcagtttgttattcttccgttaaaacagctccttctgttggttcagcataaccatcttttacaatatcccatacttcttgatatatgaaaatattttccatctgtaaccttcagtgttcaaaattttttccttcaaacaccggcaccttaattgaacttaaacttgatgtcatcttcttaatcaacaactcatacccatagccctagaatctgataccagtgctctgataccagctgcagaaaatctgatatcaaagacttaatgaacacaattcgtaactctaacaaatctcttgtattgatgtaaataaactcatggcttaacatcctatttatagtttaacaaacttgactctcaagaaaagactctttcctaacaaatcaaattataaaacaagactcttctagaatattctaaactctatacgtaaaacactatacgtaaccaaattttaaaaatggcaaacttgtttctcaagtttaatacacgttcacaataatacataatatctcctactgattttttccattgatgacaccaacttccactgattgctttcacttagacagtagcaactccacctagttgcttccataatatcatgtcaacttctttaagttgcttcctcttaacagcatcaacttctactagttcctttcacaaactatatcttggtttaatcttcaacatgtacttatttgatgagttcaaccaccagaggaatctcatcatttcatcaaagaagcaagaaccaacatgaagaaggctgcaataatcatttcttgatgatagtttagaaaatacttgaggcgcttcaattcattctctaacgcttttcgtttattactaacctcataacctaatttaaactgatgaagtcagtaattcacgtagttcctgaagataaaaccatctgttgcgatccttgccggttccccaatgcaactgtacaagagatctttttcttcttgttcacatctctctatttccgcttccttaaatgcaatattcgtctccagaaaattaaccatctcttttaacatctctgattgcagagatgtttcttcatcttgatccttagtgttaatctttgtttcagtagattctgatgtccccgccccaatagtactcgattctctctggttaacttcttcatctgcgtaatcataataatcattatcatcatcatcggtagtaaaactctcttctcaaaatttatatcttttatataacaaattcatattttcgtcgtctgaatcatcagaagatccagaacgacttatttgttttcttttttgatcaggcggaatattgcattttctgcaaccattggaacaatagttttcttttgatgatgagaatcttgatatttagagcgatgtagaaaacagagactcagcaagagcaatttgattgcatcgtcacgtagaacggtcttagtatttagttggtcgtgtcatattatagtatatactaattatccgggtcactgtagcgtgtttaattagttggatcatagtagccggatagggccggggcctacgtccgcggccttggagaaaatttaaaggcatatgtagtgcccacattaaaattcgtatgttatttggtcctgtctataataaccgggtcacagcagaatggtcctcatatttaggtggtcgtgtcatattttagtatgttagttagtcaggtcacagtagcgtgttcaattagttggatcatagtagtcggatagggagaaaatttagaaaatttaaaggcagacataatacccacatatctagtttgtcttaacatattatagtgtgttagtcgggtcacagtagcgtgtttaattggttggatcataatagccggatagggccggggatgccccttaaatttttagggaataatatctaatattaaagttatccgtttttaattgggtaaattacatcaagaaatctaattgtgaaaactacagccacacccattttccagattttggacactgtgaaaaccacgggcggaaaagtttatgcgcgcacccaattttcgtgagaaaatttctcccaaacccacaatttataaaatttggtttcttcgtatttttcttctacttcttcttcttcttcgtcacgcgaatttcttcttcaattctttttccttttttcctcccaactgtgacttccgatcagtaatattgaatattgatagacagtataatcacatgaagattagaaacaatagatgaatgcaatcgaaagttagggtttgaggtgatgttctgagatgaatcgagatcttgttgtctgttatttccgaaagatgtatgaatgggtttttttttaattaggtattatgattgagaagatggacctgagatgtgttctgagatggagatagggtttgtaattgtttcaatcaagtagaacatgaagaaaaattgatttgagatttagaaaatacagggaataataataaatcttatttgacatgggataatgaacaaagaagaagaaaatgatgttgttatgactgcataacatgtcaaacagtcgagaaaatatcttcataaacttttatgcagtcgaaaaatggatgcataacacattatccgacatctttgttattttgtgtgaaattgaaaattgatgcataatgcatcatggagtcgagaaaatggatgcataacctgatatgcatccaaaatacggctgcataatgcattatgcatagagaaaattgttgcataatcttttatgcatcagaaaatggatgcataacctgatatgcacccttaaatatggttgcataatgcactttgcatcaattttttctgtacgcactaaaatcaaccaaaacaatggctacataacttgttatagattcataacttgttatgcagtcgaaaaaatggttgaatgattcgttatgcgtctgcataatgtgttatgcatcttctttggagggtgcataatgaatatgtaatcggttttcgaaaattttccctaaaatgatgatcacctccgattttttcgtgaaaaacaaaaatttgatattgttgtttgtactcgttgtgtatctctcttaaaaagattttcaacgatataaaatttgtaaaatttcaaggcgcggttttttaaatatgttatatccaagttggtaagaccctgatgcataacccgtcatgcggatgcataatccatcatgcaaacatttttaataatttcatataattatggatgtcacggaattaaaaattaattgtgggcctgacaataaaaatattgttttttttggacctgcgcctaatttccccaatttaattatattttaatacttgaaaataaggaagcctcacttattttcaaaactcccagtgcctctcaagttattattaatttataatcggtttctatacacttgactttttaatctcacattttcatagtcggtttctgtgcacctcactcagtttattcttattcttttttttgtttggcccacacatatttaacatttagtccaccttgttagaatttcatactataaatcattctttacaattccttattagctgtaaccatgttgtatgtgaacatatttaatattttatgctgatatataattctgtatatgcatgctctataattatataatctaccacttgtaggaagatacttccaattttatcttctcttattcttaaatgatggaaaattcctttttaagcaagagctagaacggagtacacctcacctcatgctaggaaagacatatgtcattcaaccttccatcaagagttgaaaacaacctcacataggattatcataactagtatgtcattccaaatagtgtaagagatatttttccttatgtacccttaaacatacataattaacataaacaaaccttaattaattgattaggattagtactaatcaagtttaaaggaatacaaattattttttattgctgaaccaacataaaaaactgacacacctaagtctccctatttgtataaaaaaaattatccctcttgatattattttctggttcccccattaaccaataaacatgcaaaattaacactctttaaaagagtatgcatgataaatcataatatttttctctctttgaattttctcagtgatgtgattggatacattaatttggttggtttattatagtttttcatatgattatttaatttacgtacagggagacaatcgaatcctactcatcagaaatgaaacagttatccatggttctctttaataagatggaaaatgctctacaagtacaagcagccgagattaagggtatgtcagaggtgtttaaagataggacacaagcaatgaggatgaactattatcccccttgtcctaaaccaaatctcgcaatcggtcttacgtcgcactcggattttggaggtttgacaatcctccttcaaatcaacgaagtggaaggattacagataaaaaaagatgggacatggatttcagtcaaacctctacctaatgcgttcgtagtgaatgttggagatattatggaggtatttatttaagctagggtaactactggtccttgtttcgaatactggtcttatctcaagtttcatagagatagatgttgacttcaattatccataaatcataccattaatgatagatggaaagatttctttagaaatgcccgttgagtatcaatggaaaccacctaagtgtgaggtatgtaaggtttttggacattcctctaaaaactacacaaaaaagttgaaagctagatggtcttctaaatcaaaaggtatgggaattcaagatggagacaaaaatcatctcaatgcacctatcaatgaccatcagctgtctattgtggatggtagaagcgtagatgggattgaaacggttgatctaattgttgtctctattgcaaatgagagcgcaacaattgatccaccccttgtgcttgaacaaccttcaacaaaaaatgagaccaatgtcaaagatacaagtggagtttgtaaaaaaaatggatggagcaacagtggaaaaggaaattcctatacatttaacttcaacatctgcatcatcggaaaaggctacagataatgggatgattcacaaacctttctatttgcctagcgacttgccttaccaatggaaagatttgtctgacaaggctgctcaagctacagtaacaaagtcagttcaagttaattctacaaagagtccggtcaggactgctagcattcagaagagtggggaagtgaaacataatctctttcttgtaaagggacacggcaactgggagacagcttcaagtcggaaatctccaactaagactcaacagagtggtgaagggaaacataatccctttattgtaaagggactgggaaattgggagacggcctcaagtaggaaatctcctgccaaggttgttgcgcctaataaggatggtcatatcaaaactaggagcatcgacactcctgtcaaagtgaataacactttcaaagtgttgagtaatgtacacaattctcaagttgaagatagagttataatagaagagtaccaagaggatagtgaagaattttatgatgtagaagcggatagatatgctcaacatttggcttgtgaagacaaaactagtaagaaaatgaaaaaagaatgttcaaggcttaaatggaatggtgaaatcccaaatgaaaacttcggtaaaggccaacactctgttgctaggaagcataagtaacttgtattttccttttggtttttcagcttaggttttagcctgctgaattttctttgtgcttgttttaggagtcggcttttgtcgctctttagtttgagtttctctgttgtcggtgctggcgttgccttccccgttggaatcgcttaggcgctcctctcctttttctgtttctttttatcatcaatatattctcaaccttttaagtaaaaaaaaatccatttattttttcattactttttttatcagaaaatttttatattgttgccgtggccagacaagaaaagcatacacgatgtgaaccggacaaccccataaatattgcctctgatatggacaatcattatgttttaaagaccaaaaaacatattgatgcagaaagctttcttctgcacaactaattacttctgtgggagacaaattgtataagctttcttctgcaacaatctcctaagcttttcaaaagggaaatcctgaacttagttttgatttgtataactatagattgttgcattatatcaattacaactctattgtagcgcaagaatcatgatcataaatgttctcccgattgcctccggtcaaaccacctagttaaagttcgaatattctagctctcaatcagtgaagaacttacactgtgtttccaagttatagaagctactaagaataagagggtagttgtgagtgcatacagaaatattggaactgcatacagggtagttggaactgtagttgtgactgcatacagaataagagggtagttgtgaccagctctcaatgtcgtcgtgtctttccccttttctctctgaaacaaagaagaagaagaaaaaactactttcttccaaaactcaattccttgatccgtccggttttgatttgatttttcagatctaccggacagatcgagtttgtgtccttgtatatattaattttccaacaaaaaaattatttctaaataatttttacggttttctgataggtctaatggtttcacaaaattatcaggacctgttttcatattttctaattaggttattttggtgggtttggatttgcattgctctggaagaaaacgacctacttcgtcaaatatggagatcgtttctaaagaaattaatttgggcatattactttccttttatggaagcatctgatcatcaagaaacaaaatggtttaaaaccattataaggattttcaatccttcaaagagctgcagaagtttaataggattttcatatttcgtttctttaagtttcgattgtaaatcttgtaccgtctgtgttgtcctgttcattgatgtaattgatcaatgtaatccttctaacctcaatttgaatgaggttttctaataaataaaatttagggttttcttgaagcccctttttccatcaaaaaaaaaaaaaaaccccaaaacataaggatagtactttggggacttcaaatgaaatttcaaaaaaaaaaagaaaaaaaaaagctattctaagaggaaaaaaataggccattgatggtggtttcgcccgtcactatttggacctccaaatatccaccagcacccgtcatgcaaactccaatataataaatcatcccacaaagttcattcttcagatcataagatatcctataactttcttgcaaattcaaaacataattaaatcgaacagaaactagaagaatagataatttttaaaccaagaacatcggcgctaatgatgaattgccttcagtccacaatacaagatgaaaaggatactgctaacgatgtccaaatgttttcaacaacatttgatatgttttattacaattaatccaacatggataaaaaattcagaaaacaacttaaacaaaacactcacttcaaacaaaaacatatagaaagaatccacataaaggttcatgcaacggaagatccatctgcgtactaacccgtacatactttagaaaatatgatatcaaagacttaatgaacaaaattcgtaactcaaaaaaatctcttgtattgatgtaaataaactcatggcttaacagcctatttatagtttaacaaacttgactctcaagcaaagactctttcctaacaaatcaaattctaaaacaagactcttctagaacattctaaactctatacgtaaaacactatacgtaaccaaacattaaaactgggaaacttgtttctcaagtttactacacgttcacaataacgcgtaatatctcctactgattgtttccattgatgacaccaacttccactggttgctttcactcagacagtagcaactccacttagttgcttccacaatatcatgtcaacttctctaagtttcttcctcttaacagcatcaacttctactagttgctttcacaaaatatatcttggtttaatcttcaacatcctcccttaaaccaagatattctttactaatcattccaagttttccacgcaaatagatgaaggtattagacttcaaagacttggtaaaaatgtcagccacttgatctttactttcaaaaaattcagcagcaatctccttattgctgacaagctctctaatgtaatgatatttgatatcaatgtgtttactccttccatgaaacacatgattctttgttaatgaaattgaggacttgttatcacatattattgttgtaggtgtaatcttctcattgaaaaaagacttcaacatcaaccttagccatacagcgtgtgtatcacaatttacagcagctatgtattcagcttctgttgtagacaaggaaacaacttgttgtttctttgatgaccaggaaaaaaatcatgttcctaaaataaatgcataaccagatgtaatcttccttccttttgtgtctccagcccaatcattatctgtataaccaaccaattttggatcttcagaaattgtataaagcattcccaaactaattgttcatttaacatacttcaaaatcctctttgcaacttgtagatgtgactgtcttagtgactccataaacctactaactaatccaactgcatacataatgtctggtcttgtataagttaaatatctcagacatccaacaagactcttaaaatatgttgagttcacaagttctcctgattcatcttttgttagcttcaacctttctttagttggttttcaaattggattacaattatccatcttgaaacgcttaagtattccttatgcatatctccgttgattaataaagatacctctttcagtttgttgtacttcaatgccaagaaagtatgacattaatccaagatctgtcatctcaaactctttcaccatatccttccagaattccttgatcatctctgagttattgccagtaaaaataagatcattcacgtacaaacaaactataatatgattgccaaatgaatcagctttcaaatacagtgtatgctcatgtggacatcttgtaaaactttctcaataaagtatgaatcgattcttgtataccaagcacgtggtgcttgttttaaaccatacaaagccttttttagcttgtacacttgattctacttcccctccataacataacctgctggttgctcaacatatacttcttcttctagtacaccattcaagaatgcactctttacatccatatgaaatatcttccattgcttctgagcagctagagaaatgatcattcgaactgtatcaagtcttggaactggtgcaaagacttcagaatagtatattccttgtttttatctatatcctttagcaactaaccttgctttcaatttatcaacttcaccatctgatttttactttgtcttgtaaacccatttgactcctattgatttctttccttctggaagttctgtaagttcccatgtattgttcttctttattgagtttatatcagcttccattgcttgtacccatccattatctttagaggattcttcataaacaacaggatcacaatctccatataaagcaaaattaatcttctattcatcagtatcatcatctcttgttatcacataatctttcattcttgctggtataacatattttcttcttggtcttgctgtctcttgttgtggtatcacatcagttcttacctcttcagttgttgtgccttctgttcttctttcttcttgttgtttaataacttcatcttgagtatttatttgttgttcaactgctattggaactgttctgacattttctcttgttgagctggttgcattccgattccactgagagtcttcatcaaagattacatctctattaataattattttccctgttaaaggattgaaaagtttatatcctttggttactgaactataacctttgtcatctaccttatttctaagttctttaggtacatgtgcataagcaatgcacccaaaaactctcagatgtcttacacttggtcttgcacctctccaagcttcttttggtgttttattattcaaactatttcttggacatctattaagtaaatacaatgatatatcaactgcataactccagaagttctttggtaaatcttttgttcttcttataattcttgccatctccattattgttctattctttcttttctgcaacaccattctgttgaggtgtatatctagttgttaattgatgtagaatgccatgttcttccataaaactatcaacaactgctttagcttgcttaatatagataactctatccatgagagattcatgaactcctagatgaagaatataagttgttgtagaattgttcttcctgtttgctgttaaagcagtttgttattcttccgttaaaacaactccttctgctggttcagcataaccatcttttacaatatcccatgcttcttgatatatgaaaatattttccatctgtaacctacagtgttcaaaaaatttccttcaaacaccggcaccttaattgaacttaaacttgatgtcatcttcttaatcaacaactcatacccacaaccctagaatctgataccagtgctctgataccagctgcagaaaatctgatatcaaagacttaatgaacacaattcgtaactcaaacaaatctcttgtattgatgtaaataaactcatggcttaacatcctatttatagtttaacaaacttgactctcaagaaaagactctttcctaacaaatcaaattataaaacaagactcttctagaatattctaaactctatacgtaaaacactatacgtaaccaaattttaaaaatggcaaacttgtttctcaagtttactacactttcacaataacgcgtaatatctcctactgattttttccattgatgatagtagcaactccacctagtttcttccataatatcatgtcaacttctttaagttgcttcctcttaacagcatcaacttctactagtttctttcacaaactatatcttggtttaatcttcaacacgtacttatttgatgagttcaaccaccagaggtatctcatcatttcatcaaagaagcaagaaccaacatgaagaaggctgcaataatcatttcttgatgatagtttagaaaatacttgaggcgcttcaattcattctctaacgcttttcgtttattactaacctcatcacctaatttaaactgatgaagtcagtaattcacgtagttcctgaagataaaaccatctgttgcgatccttgccggttccccaatgcaactgtacaagagatctttttcttcttgttcacatctctctatttccgcttcttaaatgcaatattcgtctccagaaaattaaccatctcttttaacatctctgattgcagagatgtttattcatcttgatccttagtgttaatctctgtttcagtagattctgatgtcaccgccccaatagtactcgattctctctggttaacttcttcatctgcgtaatcataataatcattatcatcatcatcgatagtaaaactccattctccaaatttatatcttttatataaccaattcatattttcgtcgtctgaatcatcagaagatccagaacgacttatttgttttcttttttgatcaggcggattatattgcattttctgcaaccattggaacaatagttttcttttttatgatgagaatcttgatatttagagcgatgtagaaaacagagactcagcaagagcaattcgattgcatcgtcacgtagaacggtcttagtatttagttggtcgtgtcatattatagtatacactaattatccgggtcactgtagcgtgtttaattagttggatcatagtatccggatagggccggggcctacgtccgcggccttggagaaaatttaaaggaatatgtagtgcccacattaaaattcgtatgttagttggtcctgtctataataaccgtgtcatagcagaatggtcctcatatttagttggtcgtgtcatattttagtatgttagttaattagatcacagtagcgtgtttaattagttggatcatagtagccggatagggagaaaatttagaaaatttaaaggaagacataatacccacatatctagtttgtcttaacatattatagtgtgttagtcgggtcacagtagcgtgtttaattggttgcatcataatagtcggatagggccggggatgcccattaaatttttagggaataatatctagcattaaagttagccgttttcaattgggcaaattacatcaagaaatctaattgtgaaaactacagccacacccattttccagattttggacactgtgaaacccacgggcggaaaagtttatgcgcgcacccaattttcgtgagaaaatttctcccaaacccacaatttataaaatttggtttcttcgtatttttcttcttcttcttcttcgtcacgcgaacttcttcttcaattctttttccttttttcctcccaactgtgacttccgatcagtaatattgaatattgatagacagtataatcacaagaagattagaaacaatagatgaatgaaatcgaaagttagggtttgaggtgatgttcctagatgaatcaagatcttgttattttttatttccgaaagatgtatgaatgggttttttttttaattaggtattatgattgaaaagatggacctgagatgtgttctgagatggagatagggtttgtaattgtttcaatcaagtagaacaggaagaaaagttgatttgagatttagaaaatacagggaataataataaagcttatttgacatgggataatgaacaacgaagaagaagatgatgttgttatgactgcataacatgtcaagcagtcgagaaaatatctgcataaacttttatgcagtcgaaaaatggatgcataacacattatccgacatgtttgttattttgtgtgaaattgaaaattgatgcataatgcatcatggagtcgagaaaatggatgtataacctgatatgcatccaaaatacggctgcataatgcattatgcaaagagaaaattgttgcataatcttttatgcatcagaaaatggatgcataacctgatatgcacccttaaatatggttgcataatgcactatgcatcaattttttctgtacgcactaaaatcaaccaaaacaatggctacataacttgttatagacgcataacttgttatgcagtcgaaaaaatgattgcataattcgttatgcgtctgtataatgtgttatgcatcttttttggaggctgcataatgaatatgtaatcgattttcgaaaattttccctaaaacgatgatcacctccgattttttcgtgaaaaacaaaaatttgatattattgtttgtactcgttgtgtagctctcttaaaaagattttcaacgatataaaatttataaaatttcaaggcgcggttttttaaatatgttatatccaagttggtaagcccctgatgcataacccgtcatgcggatgcataatccgtcatgcaaacatttttaataatttcatataattatggatgtcacggaactaaaaattaattgtggacctgacaatgagaatattgttttttttggacctgcgcctaatttccccaatttaattatatttgaatacttggttgcgccaagcctaagttagcattgatcatatcatgctattatttatttttatttctttgttttcaacggaattgcagaccatatttgtttgatgagcaatttgtgagagttatcaaaacttgtcacttacaaagagttatataagccgactcttattaccacttaagttgggaatccgtgaaatgacaaaaattccaattccttgccgtatccaatcttaggaagcccattaacgtaattagtttaaggacaaattaaaatacagtcacagtattaagatgcggtttgcaaaagcatcctactactacaaaccattaacaagatggtcctacttccgttaaaagcaaggttatgtcactgggacccactggtgcaagagttaaatgcactggcaatttgacgagtttgcccttaaccagaccgggttaaatctagtaccgtatatctcatacggagtcatcttgatgactaaatatacggccaagattatggtcttagagtatatccttaacctaatgaatttagatctactaccatacatcttacaattgatgcatctcgagatgaaacagacggataggatcagaagttggaacactcgatctataacagtttagggttcaggaaatgaggcaaagtcatttcatttcgtctcagccatctctctctaaattttctgcagaaatggcgatacactcgaaaacttgagattttcagtggtttatgtcgcaaacagatcatcactagattaggctggtagtgttaatggttttttatacatcttcaatgcttattcgtgaagattagagagcaaagaaggtaactggtggtcaaacggcggtggttttcttacaagatttcgtcactatgtacgcgaatataatgaggttggtattcataaccataaactgtcaatttcacattagatttcagtatccctaattggtcgatttttttcaacttttataaaccctaatttttcaaaattgggtattttacaaattcagtaatttggtattttacaaatcgatttagtaaaccctaatttaggactgttgttatgttatctgctacaaatcaattcagtaattcggtattttttctgtccatttagtgacccctaattgaggaaaataggtatgttatatattactagtcacatacttatattttgaatttgattatgtgtattgcaggaagtctgtgaagaacccagttagaagctttagggttgaggaaaatgatacaaataagattaggtattttgataatataagtgtgaactgtggtggattgaatggttttagtgatgttgttcatgctgcatatcagttaccccctattaagaaggttagtctgacctggttcagtgacacagacccaaaaccaaaaggaacagttcctgctgctgctactcaataacttcctttctatttttaaaacacttatgttatgttatgggcctttgttctctatgttttggactgatgaacacacttatgttatgttatggtcttaatgtatgttaatattctatgttattttgatggtgtcatgatcatgaaagtttctttttatttaaagtgtagctcattatatttgtagatcttctatttccttgcataattctgtcattttcagagatgtttttcttacatttgatctagctgcattgaagacaacatcagacaaccattgaaaatcaagacagttggagcacttgaggtaagcaatattatagttgtgtgcattctggcagaagaaaagcatcacagtttccttacacttcttcttcttgcagtcttggttcttccatggacagttgttgtgcatatgactcttgtcacagatcagatcttccacgtttgcaaaccacgtcagccacaggttaactctagttaactgggttttgttaggatagagggcattttgggaacatttaacaccgtttttttgaaaaactgttatgtcgcccaaagtgtgactgttttgtatacgatttataaaagtatgatcaatttataaccaaattagaaaaagtatgaccattttgtaattggctcttagtttaatttccatggctgccactaactccatagccatcgatcttggccatcatgtacagtggggactcaaggtttccaccaggttttccatcgctgccactaactcctttatgtagagtatctatgcttcctaaggttggatacggtaaggaattgcagaccataataaactaattacttttatggtctccctgcactcttcctttatgcagtatctatggtgactccatcgtgcatgctctctctgaaaaaattgcaaatgcagatacatgttagttcaccaaattgcaaatgctgcatgttgttgcagttactggtggtgcacctactaccaacagacaatcattaaactttcgtactttacattaggtacaattaatactactccgggctataaatgtatagttaattgggatcgactaaaatcattgagttataccaaagataagcactattaacttaacaaatcataaacaataaccctatcgccatctccagggaagatttcatgagcccacttaatctaaagctccatccttgacgttaatttagattgctcgtaaaaaaaaaaaaaaaaaaaaccctgaaattagaaaagataacactccttagttagggattatcacatagccaatgaataaaatcagcaaaccttgcaaccaatttgaatttgtacagagaaaaggaggatgcgtagggcacatgtgatccaaaagaacgtagccatcagcatatgcctgctagcatatgcggttccctgtagaagttcttgtaggagtaacaatgcagttccctgagatggagaagtttctgaaaattgtaggaattagagaaacacggagtaggagaaactaaaacacatagctacggcatagatataaggtcacagttcgttatattaggaaagagaaggaaaaaaaaccataggtttcaatttctgaaatcattacaaaaatcaattcctatcaccaaaatctcttcttatttagcaaattcttcaagttcaactgaaatcaacaaaaagaagatggagatgtcgcaaggaatttctcaagtatgagaagaagcggtggctcacaaaatcactgttgacgtttgagaagaagaagcatatgacatgttatatggaaacgaaaaggaagaagaggagaaaaaaagattagggtatcctgcaaggtttcttatggacggatctatctctcaaaacatgatgagttttatattcatgatgaagagagtatatgattttcattacggaaacaggatgttcgtccttattacaaatcaggaaccggggatccgaggtacgaaaatatcgctccccaactttcaatccggaccttaggataacgaaatcaatgatcagatatatccggatagacagaatacacttccttttataatatatatttacgaactaaaaaataattttatgttgcgtagtaaattaccagctttagtagcacaaacaatttaaatttggtgagacttttgggattctgcgctgaaagtcgttacagactactggaatgtggaagaaacttctaaaatggtgttgactgctaatggggtactgttttactgagggtgtaccgatatgcatataggaaaaagaagcattttattttgggttgatacgcccccaagcaaaagggtacctcattagcagccttgacattagtgggtaggtatgcagttgcaccccttcaagtatgagctcccaggcccaatttaaattattttaccccacctttagccattttaagccctttgcatccctcgaatatattcacattgataactttcccacccactcttcaaaagctagctaattggagctgatgcacgagtcaaatggtcttcaattcaataaggctgaaatttagtagagtcctctttgaaatttgactgttttgttgtaggatttctactaacagcaattgtggtgtgacacaatgcaaagatttcctttttaacggatagtactagaactagattttgggaagaccagtggttaggtgatactcctgtaaaaatttccttttccaacctatacaatgtctcaaggaagaaaaacaatgtagtcaaataattttatagcagaaacagagaagggtagtcgaaatggtaccggacttgaggaggagaccattaaatattgagatagtagaagcagagaaactatctaacaaaatgcaacacgtgacactgagtgacgtcaaaaaacagaaaatatggaagtgggcaacatgcggagcctttacgatacgctcctgctattcatctctaattccttccccgtccttcgttgactttactcacaagattattcgtaataataatgtgcataccaaagttaattctttttacgtggttggtctatcataattccttgctaactcaggatattctagaaaagagagggagaacgttagtaaacatatcttatatggggaaaaacaagattgcctgtcagttgaaggttttctgcgatatttagagtactattatggtatcaaatttaacctcgttaaattctcgtctcttttattctagtttgtggttatttgcaatatttagagtactattatgtatctgtgctaaacgttttcacggattttagcataaagttcactgatttcgtaataaaatatgatacataagtacacacttcttttcccatgtgaggaaaagcaatgagaggggccgttggcccatacacattgtgcaaaatgtctgaataataatctttatgtttaaaaatgaacaatttgtgatgctaatttgttcaagcctaaacgcactgcagactcaaatataattctttcaaggcaaattaacacggtaccttttttggcttccacaatcacagccagcttctcttaacaagaacttgatcgtgttgatttagttgttgattatctttgaccatttggtaaaatcatagacatcaaactagtagctctgacccttcgttcggtgaaaagataaatgcatgactcataaaaactgtgcgcaatacatattaagtatatataagatcatccataagagagaaagaaacacaagtactacccattctgaattttcgataagaaattgattcattaattaatttagaaaaatcatggagaaagcaaaacttatgaagctaggtaatggtatggaaataccaagtgttcaagaattggctaaactcacgcttgccgaaattccatctcgatacgtatgcaccgatgaaaaccttttgttgcctatgggtgcatctgtcataaatgatcatgaaaccattcctgtcatcgatatagaaaatttattatctccagaacccgtaatcggaaagttagaattggataggcttcattctgcttgcaaagaatggggtttttttcaggtatatatgtcgtaaatacaagcattgtgattgcacccagtagttgtactttgttacactaaatattagctagtgaatcttcctttacatatatatgttgcaggtagtgaaccatggagtcgacgcttcattggtggatagtgtaaaatcagaaattcaaggtttctttaacctttctatggatgagaaaactaaatatgaacaggaagatggagatgtagaaggatttggacaaggctttattgcatcagaggaccaaacacttgattgggcagatatatttatgatgttcactcttccactccatttaaggaagcctcacttattttcaaaactcccagtgcctctcaggttattactaattcataatcggtttctatgcacttgactttttaatctcacattttcatagtcggtttctgtgcacctcactcagtttattcctattcttttttttttgtttggcccacacatatttaacatttagtccaccttgttagaatttcagactataaatcattctttacaattccttattagctgtaaccatgttgtatgtgaacatatttaatattttatgctgatatataattctgtatatgcatgctctagaattatatattctaccacttgtaggaagatacttccaattttatcttctcttattctttaatgatggaaaatttctttttaaacaagagctagaacggagtacacctcacctcatgccaggaaagacatatgtcattcaaccttccatcaagagttgaaaacaacctcacataggattatcataactagtatgtcattccaaatagtgtaagagacatttgtccttatgtgcccttaaacatacataattaacataaacaaactttaattcattgattagggttagtactaatcaagtttaaaggaatacaaattatgttttactgctgaaccaacataaaaaactgacacacctaagtctccctatttctgcaaaaaaaattatccctcttgatattattttctggttcccccattgaccaataaacatgcaaaattaacactctttaaaagagtatgcatgatagagcataatattttcctctctttgaattttctcagtgatgtgattggatacattaatttggttggtttattatagtttttcatatgattatctaatttacgtacagggagacaatcgaatcctactcatcagaaatgaaaaagttatccatggtcctctttaataagatggaaaaagctctacaagtacaagcagccgagattaagggtatgtcagaggtgtttaaagatgggacacaagcaatgaggatgaactattatcccccttgtcctcaaccaaatctcgccatcggtcttacgtcgcactcggattttggcggtttgacaatcctccttcaaatcaacgaagtggaaggattacagataaaaagagaggggacatggattttagtcaaacctctacctaatgcgttcgtagtgaatgttggagatattttggaggtatttatttaagctggggtaactactggtccttgtttcgaatactggttttacctgtacccagaaaatttcttattgttttttcttttacagataatgactaatggaatttaccatagcgtcgatcaccgggcagtagtaaactcaacaaatgagaggctctcaatcgcaacatttcatgaccctagtctagagtcagtaataggcccaatatcaagcttgattactccagagacacctgctttgtttaaaagtggatctacatatggggatcttgtggaggaatgtaaaacaaggaagctcgatggaaaatcatttcttgactccatgaggatgtgaaaactcaagaacacaataatacgaggtgattgcatgtcagattcaactatccttttgtcgttttttggtgctcgagtccttaattgttttcatcattgcttttgattctaattaataagacttttctcaagaactctcatgtaatgtacctttaatttcagaaaataaaacgtattgaggcacaaatgagaaaattgacagagtgcttgagaagtgtaatttctcgaaagtgcgttgtgtttgtgttttgttatttcttcaagtgtgtactgatcttagttttgttcgtgttctcctattgttactaattttttcaacgaggttctttcttttctctcgtgatttaatcgtatatggtgcaccaaccagttatctatactttggagcacttataaaaccaacccgaaacacacagacacaacccgaaaccacacattaaatgtctcaccttgagtaagatagcttgagcactgggagaactcgtacagaattggttaggtacacctgaatatcttagaacgagaaacttataatggcaaagttgagaaggtttactcgcttaaaccggtcggtattctacttttaagagatgcagagaagtatggtatcgatgattctaggcatgactcgaaaatatttcatggttgcatcgcaggatatcaaagaagttttaggaaatggaagtgcgaatgcatttgagaaagtaatgggaatggatagtggaagtatttaaaaagctacaaagcttttggattctcttgttgatgtttgtgaaggaaatgaaacaacaatcatggaaatctataaagcttttccgcatataaaatgtacactttatgatcttcatcatgttacttctaacactcacgatcaccctaacatcgaaaaagttctcggtgatatatgttcaactctgttcccagcgctcaagatatcttactgaagatgagacatttaacctaatactcttctaaagatgaccctctttttttttcttttttttttaaagatgacccttcatcttgcatgactggaacgatgaacactgtgtcaagattctaaagaagtgcaaggaagcaaggcccaaagagacgagtaaagtaatcatagtggatgtagtacttctaaaagaatctaaaggtgaactcagaaaggaaagattgattccagatcagtgttttaagaatcggaccggccgattggaccagcaaccggtgaaccaataataaaaactatccggttcaatattgacccactaacatgtcaaaaaacccagtaaaaccagtaaaccggacggttgaaccagtaaccagtgagacccagtccggtctaaaaatgggttgatctaaaaaaaaaaaaaaagaatttgtacatgacattctaaagaatcgaaacattgtatcattccattaaaatcactcaaacatggacacttcataaacattggacctgtctaaaaaaccccatttatttaaattttttatttatcttctggatcttcacaaaaactttgagaatctttcaagagttttaaaagcatcggtatcacttcatcagaaaacagtacttcagcacaagattacattttattatggaatagtaattttgatgatgaattttggatgtaatttagacttttctacataaaaaacaaataagaaaagctcaattaaacggagaagagataaaatcacaaaaatgtgcagttggtgatagtttaaaagtaaccaaagaaaattggtcaaagagtgtgaaagaggaacagaaagagacagtgaaggagcaagagagacgtaaggagaagggatggggactaaaatgagattaggtattaaagtgttgcttctgagaattgttttgtccacacatgacacaactaccctttgacacgtcctagcattttttttgcctactaacccaacttgatgtctcacattcgacgtgtgtacaataaactgacaaccatcaaatatagttcgagacattcaaatctagaatgtagattattaacttctgacccagtgaactccgattgaaccactgattgacccagttaaccctgacccagtgattttactgggtcaacgtcccgtcctgttttcagaacactgttctagatatgtatatgatggtgaatactggtgatagggggagaattgcaaatgattgggaagttttgttcagaagtgcagggtttcggtctcataaaatcagacccattcgcgttattcagtctgtcattgaaaccttcccatagtaaaattaattaatctcaaaagagtactactttggttatttcactaggaagtgtgtatatataatgcgattcacgtgtcaacaataagtcaccttcacttgaggagatggttccggtgtttttttttttgaatcgtatatcaataaactgaattccttaatatttcaggtaccattatatcatgtataaaaataaaataaaatttgtggtatagtgataaaattgttaggtggtgatacaaattgtctgagttcaatactggctaatatctgatcagtatggggactaaaataaataaaaaacacaatgattaaaaaagtaagagggggactaaaataaataaaaaacacacactgattaaaaaagtaagaaaaaacattggcagcgtgatgtggagaggggtcaccaaccaaatggagagtttttataaaggaatcatgcataatgcataaaggggatagaattagatttcgggaagaccagcggttaggtgaatgaactgcaggagatgacataaaggatgctttcaaagacagatattgaaaaaatttactataagtggaaattttattaatttaaaacatcctaccttatgccatttgttgcaacaactagagagaatgtaataaactgatgttcgtcgcagaggtaaaagataagtacgctccaaagatcatattagatattgaggagaatattttggaccgatctcattcctccaaggctatagacaacattagatttgaaattttagttttaaaatgggaagaactatttcataggtaattgtatggctgtctttctgtaaatttaactttcacctcggtccattatgggataaggtattgcaactatgtgattatttatccatataaatttgtatcgttttatgtcatataactggcttataaaaggagtactactttgcttctttctctaggaagtgtatatataatgcggttcaataagtcatataactgcttgtatcaacaataagtcatcttcacttgaggatatggttcttattttcccgtgttttgtttttctaaactgtatatcaataaattgaattccctaataattcaggtatgaatatcatgtatcaaaaaaattatcatagtagagtggtaaagttgttaagtgatgatactagcaatctgagttcaacactcgctagaatcggaataatgtggggactaaaataaataaaaaagcacactgattaaaaaaaattaaaaaaaaaatggcagcgggatgtgtagtggggtcaccaaccgaacggaaagcttctaagaagggatcatgcataaagtagataaatatatagaactagattttgggaagaccagtggttaggtgatactcctgtgaaaattgcctttcccaacctcattttgaccaaaacatgggtttggtctaacatttgtccaggctttgcgtttggtctaaagaccaacgttgacccgtgttgaccgtgttatatcttgacttctgtaatataattattaagaatttaaaataaaatttaattattaatccaatttactattttatccttcccttgattaatattgaccgaaagttgtatgaaaagtagaaaaacgtttcaactattccgttcagttgctaatacaatcacgattcaccaaagttgattgatcaatcgattgtgctcactttctcaagacttcggattatccccattcagccaacacataatccatcaacaaacccctgcaatcatcaccccattcgatatgttgttgtgtttctttttcaatcgagagcttttaatttcagatcacatacagacacccaaatactgcctccgattagttcttccttgtacataacacccgatccaaaatcccatggaagacttcaagtacagccaacccaatcttccccaatcatcaactaagaattactgataatcttcttcattcatctttaatttcatcaacaatacaatcacattttctccctaaatatcattggaagcaaatattttccattctttgttttctctgccatctatacttctctgtcttgatctttccatgactggcacccatctgttaaattctgaactatgtagtttcaattcccaccaagccaaaataaaacgggcgaaccctaaagaaatgtgaacgacatctgaaaccctagatttcaatcattatttgttccctccctgaaaccgagatggcggcaccataagtgttcagataaagaatgagaaatcgagagattaagggaaatgattaggtttcgagacagcggcgaagctagaaactcaactaaggggaagcaaaattccattaggggtagcaagaaagcaaaattaggcttgtgaaaaaatttgggcttgaaaattaggcttggaagaccaaagagttgcgacccttattacattctgcatccgccactggttcgagattagtaagaaatgggtttttcagacagtaattctttgttgtatttgtgtccgcaactgaagtgaaagaaggagatgcatttagagggacttgaggtgatattggtgttaacaacaaggaattgaagttgggttttctttgaattaggttttaggttgtttcgaatcaagaaatcagggaaagatatgagtaatgacgagcatcgttgatgaaagagagtgagtaatgacatggcagagaaaccaaatgcgatttttttcagatctagttttttgaatttttctcatggattcgtctcatctttctttctgaaattgatctaatgattatcttaactcaggtctttgatattgaatcaagcattgattcgtatgattttccttctctaatcgaatcatacggttctaaggagggtagttctctaaaccctaaaaagaatgaaaattctcagagggtcggtgatgatgttgataatactatgatttcaaacaattcagagattgtttcaccagggaaagaggttagagacacaaattctaatggaacaattgggtctccttcaaaaatgggttcttctaaccctaactctaaaggttggagaactttgtttccttctacacagccaattactcctcatcctcctatgaaattattttcatctactgagctaaatggaaagaaggtggtagattatgctgcagttgatttctcggcaggaattaaacgttgtgaagaatatgtggtggccttctgtgcggggaaaagattatcttttccagcagtcaaaaaagctgtagacaaccattggaaactcaagaatgaggtgagcatcaaattacatggaaattgtgcttttatttttgagtttaaagatgacgaggatcgtagaagagtttccgaataaggatcttttttacatatcgaaaagtctttttacagtgagaccatggtcgaatttgctagaatcgtcaattgctagcatcaagttagtacccatttgggtgttgatttgtaatgtgcctctgcacatgtgggatattgacggattaagtgttatctcaagtttcataggaaagcctatattagtggatgattaaactctaaagaggacaaggctatcttatgctagagtttgtgtagagatagatgttgacttcaattatccataaatcataccattaatgatagatggaaagatttctttagaaatgcccgttgagtatcaatggaaaccacctaagtgtgaggtatgtaaggtttttggacattcctctaaaaactacacaaaaaagttgaaagctagatggtcttctaaatcaaaaggtatgggaattcaagatggagacaaaaatcatctcaatgcacctatcaatgaccatcagctgtctattgtagatggtagaagcgtagatgggattgaaacggttgatccaattgttgtctctattgcaaatgagagcgcaacaattgatccaccccttgtgcttgaacaaccttcaacaaaaaatgagaccaatgtcaaagatacaagtggagtttgtaaaaaaatggatggagcaacagtggaaaaggaaattcttatacatttaacttcaacatctgcatcatcggaaaaggctacagataatgggatgattcacaaacctttctatttgcctagcgacttgccttaccaatggaaagatttgtctgacaaggctgctcaagctacagtaacaaagtcagttcaagttaattctacaaagagtccggtcaggactgctagcattcagaagagtggggaagtgaaacataatctctttcttgtaaagggacacggcaactgggagacagcttcaagtcggaaatctccaactaagactcaacagagtggtgaagggaaacataatccctttattgtaaagggactgggaaattgggagacggcctcaagtaggaaatctcctgccaaggttgttgcgcctaataaggatggtcatatcaaaactaggagcatcgacactcctgtcaaagtgaataacactttcaaagtgttgagtaatgtacacaattctcaagttgaagatagagttataatagaagagtaccaagaggatagtgaagaattttatgatgtagaagcggatagatatgctcaacatttggcttgtgaagacaaaactagtaagaaaatgaaaaaagaatgttcaaggcttaaatggaatggtgaaatcccaaatgaaaacttcggtaaaggccaacactctgttgctaggaagcataagtaacttgtattttccttttggttttttcagcttaggttttagcctgctgaatttgctttgtgcttgttttaggagtcggcttttgtcgctctttagtttgagtttctctgttgtcggtgctggcgttgccttccccgttggaatcgcttaggcgctcctctcctttttctgtttctttttatcatcaatatattctcaaccttttaagtaaaaaaaaatccatttattttttcattactttttttattagaaaatttttctattgttgccgtggccagacaggaaaagcatacacgatgtgaaccggacaaccccatcaatattgcctctgatatggacaatcattatgttttcaagaccaaaaaacatattgatgcagaaagctttcttctgcacaactaattacttctgtgggagacaaattgtataagctttcttctgcaacaatctcctaagcttttcaaaagggaaatcctgaacttagttttgatttgtataactatagattgttgcattatatcaattacaactctattgtagcgcaagaatcatgatcataaatgttctcccgattgcctccggtcaaaccacctagttaaagttcgaatattctagctctcaatcagtgaagaacttacactgtgtttccaagttatagaagctactaagaataagagggtagttgtgagtgcatacagaaatattggaactgcatacagggtagttggaactgtagttgtgactgcatacagaataagagggtagttgtgaccagctctcaatgtcgtcgtgtctttccccttttctctctgaaacaaagaagaagaagaaaaaactactttcttccaaaactcaattccttgatccgtccggttttgatttgatttttcagatctaccggacagatcgagtttgtgtccttgtatatattaattttccaacaaaaaatattatttctaaataatttttacggttttctgataggtctaatggtttcacaaaattatcaggacctgttttcatattttctaattaggttattttggtgggtttggatttgcattgctctggaagaaaacgacctacttcgtcaaatatggagatcgtttctaaagaaattaatttgggcatattactttccttttatggaagcatctgatcatcaagaaacaaaatggtttaaaaccattataaggattttcaatccttcaaagagctgcagaagtttaataggattttcatatttcgtttctttaagtttcgattgtaaatcttgtaccgtctgtgttgtcctgttcattgatgtaattgatcaatgtaatccttctaacctcaatttgaatgaggttttctaataaataaaatttagggttttcttgaagcccctttttccatcaaaaaaaaaaaaaaaccccaaaaacataaggatagtactttggggacttcaaatgaaatttcaaaaaaaaaagaaaaaaaaaagctattctaagaggaaaaaaataggccattgatggtggtttcgcccgtcactatttggacctccaaatatccaccagcacccgtcatgcaaactccaatataataaatcatcccacaaagttcattcttcagttcataagatatcctataactttcttgcaaattcaaaacataattaaatcgaacagaaactagaagaatagataatttttaaaccaagaacatcggcgctaatgatgaattgccttcagtccacaatacaagatgaaaaggatactgctaacgatgtccaaatgttttcaacaacatttgatatgttttattacaattaatccaacatggataaaaaattcagaaaacaacttaaacaaaacactcacttcaaacagaaacatatagaaagaatccacataaaggttcatgcaacggaagatccatctgcgtactaacccgtacatactttagaaaatatgatatcaaagacttaatgaacaaaattcgtaactcaaaaaaatctcttgtattgatgtaaataaactcatggcttaacagcctatttatagtttaacaaacttgactctcaagcaaagactctttcctaacaaatcaaattctaaaacaagactcttctagaacattctaaactctatacgtaaaacactatacgtaaccaaacattaaaactgggaaacttgtttctcaagtttactacacgttcacaataacgcgtaatatctcctagtgattgtttccattgatgacaccaacttccactggttgctttcactcagacagtagcaactccacttagttgcttccacaatatcatgtcaacttctctaagtttcttcctcttaacagcatcaacttctactagttgctttcacaaaatatatcttggtttaatcttcaacatcctcccttaaaccaagatattctttactaatcattccaagttttccacgcaaatagatgaaggtattagacttcaaagacttggtaaaaatgtcagccacttgatctttactttcaaaaaattcagcagcaatctccttattgctgacaagctctctaatgtaatgatatttgatatcaatgtgtttactccttccatgaaacacatgattctttgttaatgaaattgaggacttgttatcacatattattgttgtaggtgtaatcttctcattgaaaaaagacttcaacatcatccttagccatacagcgtgtgtatcacaatttacagcagctatgtattcagcttctgttgtagacaaggaaacaacttgttgtttctttgatgaccgkgaaaaaaatcatgttcctaaaagaaatgcataaccagatgtaatcttccttccttctgtgtctccagcccaatcattatctgtataaccaaccaattttggatcttcagaaattgtataaagcattcccaaactaattgttcatttgacatacttcaaaatcctctttgcaacttgtagatgtgactgtcttggtgactccataaacctactaactaatccaactgcatacataatgtctggtcttgtataagttaaatatctcagacatccaacaagactcttaaaatatgttgagttcacaagttctcctgattcatcttttgttagcttcaacctttctttagttggttttcaaattggattacaattatccatcttgaaacgcttaagtattccttatgcatatctctgttgattaataaagatacctctttcagtttgttgtacttcaatgccaagaaagtatgacattaatccaagatctgtcatctcaaactctttcaccatatcctcccagaattccttgatcatctctgagttatttccagtaaaaataagatcatccacgtacaaacaaactataatatgattgccaaatgaatcagctttcaaatacagtgtatgctcatgtggacatcttgtaaaactttctcaataaagtatgaatcgattcttgtataccaagcacgtggtgcttgttttaaaccatacaaagccttttttagtttgtacacttgattctacttcccctccataacataacctgctggttgctcaacatatacttcttcttctagtacaccattcaagaatgcactctttacatccatatgaaatatcttccattgcttctgagcagctagagaaatgatcattcgaactgtatcaagtcttggaactggtgcaaagacttcagaatagtatattccttgtttttatctatatcctttagcaactaaccttgctttcaatttatcaacttcaccatctgatttttactttgtcttgtaaacccatttgactcctattgatttctttccttctggaagttctgtaagttcccatgtattgttcttctttattgagtttatatcagcttccattgcttgtacccatccattatctttagaggattcttcataaacaacaggatcacaatctccatataaagcaaaattaatcttctcttcatcagtatcatcatctcttgttatcacataatctttcattcttgctggtataacatattttcttcttggtcttgctgtctcttgttgtggtatcacatcagttcttacctcttcagttgttgcgccttctgttcttctttcttcttgttgtttaataacttcatcttgagtatttatttgttgttcaactgctattggaactgttctgacattttctcttgttgagctggttgcattccgattccactgagagtcttcatcaaagattacatctctattaataactattttccctgttaaaggattgaaaagtttatatcctttggttactgaactataacctttgtcatctaccttatttctaagttctttaggtacatgtgcataagcaatgcacccaaaactctcagatgtcttacacttggtcttgcacctctccaagcttcttttggtgttttattattcaaactatttcttggacatctattaagtaaatacaatgatatatcaactgcataactccagaagttctttggtaaatcttttgttcttcttataattcttgccatctccattattgttctattctttcttttctgcaacaccattctgttgaggtgtatatctagctgttaattgatgtagaatgccatgttcttccataaaactatcaacaactgctttagcttgcttaatatagataactctatccatgagagattcatgaactcctagatgaagaatataagttgttgtagaattgttcttcctgtttgctgttaaagcagtttgttattcttccgttaaaacaactccttctgctggttcagcataaccatcttttacaatatcccatgcttcttgatatatgaaaatattttccatctgtaacctacagtgttcaaaaaatttccttcaaacaccggcaccttaattgaacttaaacttgatgtcatcttcttaatcaacaactcatacccacaaccctagaatctgataccagtgctctgataccagctgcagaaaatctgatatcaaagacttaatgaacacaattcgtaactcaaacaaatctcttgtattgatgtaaataaactcatggcttaacatcctatttatagtttaacaaacttgactctcaagaaaagactctttcctaacaaatcaaattataaaacaagactcttctagaatattctaaactctatacgtaaaacactatacgtaaccaaattttaaaaatggcaaacttgtttctcaagtttactacactttcacaataacgcgtaatatctcctactgattttttccattgatgatagtagcaactccacctagtttcttccataatatcatgtcaacttctttaagttgcttcctcttaacagcatcaacttctactagtttctttcacaaactatatcttggtttaatcttcaacacgtacttatttgatgagttcaaccaccagaggaatctcatcatttcatcaaagaagcaagaaccaacatgaagaaggctgcaataatcatttcttgatgatagtttagaaaatacttaaggcgcttcaattcattctctaacgcttttcatttattactaacctcatcacctaatttaaactgatgaagtcagtaattcacgtagttcctgaagataaaaccatctgttgcgatccttgccggttccccaatgcaactgtacaagagatcttttcttcttgttcacatctctctatttccgcttccttaaatgcaatattcgtctccagaaaattaaccatctcttttaacatctctgattgcagagatgtttattcatcttgatccttagtgttaatctctgtttcagtagattctgatgtcaccgccccaatagtactcgattctctctggttaacttcttcatctgcgtaatcataataatcattatcatcatcatcgatagtaaaactccattctccaaatttatatcttttatataaccaattcatattttcgtcgtctgaatcatcagaagatccagaacgacttatttgttttcttttttgatcaggcggattatattgcattttctgcaaccattggaacaatagttttctttttatgatgagaatcttgatatttagagcgatgtagaaaacagagactcagcaagagcaattcgattgcatcgtcacgtagaacggtcttagtatttagttggtcgtgtcatattatagtatacactaattatccgggtcactgtagcgtgtttaattagttggatcatagtatccggatagggccggggcctacgtccgcggccttggagaaaatttaaaggaatatgtagtgcccacattaaaattcgtatgttagttggtcctgtctataataaccgggtcatagcagaatggtcctcatatttagttggtcgtgtcatattttagtatgttagttaattagatcacagtagcgtgtttaattagttggatcatagtagccggatagggagaaaatttagaaaatttaaaggaagacataatacccacatatctagtttgtcttaacatattatagtgtgttagtcgggtcacagtagcgtgtttaattggttgcatcataatagtcggatagggccggggctgcccttaaatttttagggaataatatctagcattaaagttagccgttttcaattgggcaaattacatcaagaaatctaattgtgaaaactacagccacacccattttccagattttggacactgtgaaacccacgggcggaaaagtttatgcgcgcacccaattttcgtgagaaaatttctcccaaacccacaatttataaaatttggtttcttcgtatttttcttcttcttcttcttcgtcacgcgaacttcttcttcaattctttttccttttttcctcccaactgtgacttccgatcagtaatattgaatattgatagacagtataatcacaagaagattagaaacaatagatgaatgaaatcgaaagttagggtttgaggtgatgttcctagatgaatcaagatcttgttatttgttatttccgaaagatgtatgaatgggtttttttttaattaggtattatgattgaaaagatggacctgagatgtgttctgagatggagatagggtttgtaattgtttcaatcaagtagaacaggaagaaaagttgatttgagatttagaaaatacagggaataataataaagcttatttgacatgggataatgaacaacgaagaagaagatgatgttgttatgactgcacaacatgtcaagcagtcgagaaaatatctgcataaacttttatgcagtcgaaaaatggatgcataacacattatccgacatctttgttattttgtgtgaaattgaaaattgatgcataatgcatcatggagtcgagaaaatggatgtataacctgatatgcatccaaaatacggctgcataatgcattatgcatagagaaaattgttgcataatcttttatgcatcagaaaatggatgcataacctgatatgcacccttaaatatggttgcataatgcactatgcatcaattttttctgtacgcactaaaatcaaccaaaacaatggctacataacttgttatagacgcataacttgttatgcagtcgaaaaaatgattgcataattcgttatgcgtctgtataatgtgttatgcatcttttttggaggctgcataatgaatatgtaatcggttttcgaaaattttccctaaaacgatgatcacctccgattttttcgtgaaaaacaaaaatttgatattattgtttgtactcgttgtgtagctcttttaaaaagattttcaacgatataaaatttataaaatttcaaggcgcggttttttaaatatgttatatccaagttggtaagcccctgatgcataacccgtcatgcggatgcataatccgtcatgcaaacattttttaataatttcatataattatggatgtcacggaactaaaaattaattgtggacctgacaatgagaatattgttttttttggacctgcgcctaatttccccaatttaattatatttgaatacttggttgcgccaagcctaagttagcattgatcatatcatgctattatttatttttatttctttgttttcaacggaattgcagaccatatttgtttgatgagcaatttgtgagagttatcaaaacttgtcacttacaaagagttatataagccgactcttattaccacttaagttgggaatccgtgaaatgacaaaaattccaattccttgccgtatccaatcttaggaagcccattaacgtaattagtttaaggacaaattaaaatacagtcacagtattaagatgcggtttgcaaaagcatcctactactacaaaccattaacaagatggtcctacttccgttaaaagcaaggttatgtcactgggacccactggtgcaagagttaaatgcactggcaattttacgagtttgcccttaaccagaccgggttaaatctagtaccgtatatctcatacggagtcatcttgatgactaaatatacggccaagattatggtcttagagtatatccttaacctaatgaatttagatctactaccatacatcttacaattgatgcatctcgagatgaaacagacggataggatcagaagttggaacactcgatctataacagtttagggttcaggaaatgaggcaaagtcatttcatttcgtctcagccatctctctctaaattttctgcagaaatggcgatacactcgaaaacttgagattttcagtggtttatgtcgcaaacagatcatcactagattaggctggtagtgttaatggttttttatacatcttcaatgcttattcgtgaagattagagagcaaagaaggtaactggtggtcaaacggcggtggttttcttacaagatttcgtcactatgtacgcgaatataatgaggttggtattcataaccatagactgtcaatttcacattagatttcagtatccctaattggtcgatttttttcaacttttataaaccctaatttttcaaaattgggtattttacaaattcagtaatttggtattttacaaatcgatttagtaaaccctaatttaggactgttgttatgttatctcctacaaatcaattcagtaattcggtattttttctgtccatttagtgacccctaattgaggaaaataggtatgttatatattactagtcacatacttatattttgaatttgattatgtgtattgcaggaagtctgtgaagaacccagttagaagctttagggttgaggaaaatgatacaaataagattaggtattttgataatataagtgtgaactgtggtggattgaatggttttagtgatgttgttcatgctgcatatcagttaccccctattaagaaggttagtctgacctggttcagtgacacagacccaaaaccaaaaggaacagttcctgctgctgctactcaataacttcctttctatttttaaaacacttatgttatgttatgggcctttgttctctatgttttggactgatgaacacacttatgttatgttatggtcttaatgtatgttaatattctatgttattttgatggtgtcatgatcatgaaagtttctttttatttaaagtgtagctcattacatttgtagatcttctatttccttgcataattctgtcattttcagagatgtttttcttacatttgatctagctgcattgaagacaacatcagacaaccattgaaaatcaagacagttggagcacttgaggtaagcaatattatagttgtgtgcattctggcagaagaaaagcatcacagtttccttacacttcttcttcttgcagtcttggttcttccatggacagttgttgtgcatatgactcttgtcacagatcagatcttccacgtttgcaaaccacgtcagccacaggttaactctagttaactgggttttgttaggatagagggcattttgggaacatttaacaccgtttttttgaaaaactgttatgtcgcccaaagtgtgactgttttgtatacgatttataaaagtatgatcaatttataaccaaattagaaaaagtatgaccattttgtaattggctcttagtttaatttccatggctgccactaactccatagccatcgatcttggccatcatgtacagtggggactcaaggtttccaccaggttttccatcgctgccactaactcctttatgtagagtatctatgcttcctaaggttggatacggtaaggaattgcagaccataataaactaattacttttatggtctccctgcactcttcctttatgcagtatctatggtgactccatcgtgcatgctctctctgaaaaaattgcaaatgcagatacatgttagttcaccaaattgcaaatgctgcatgttgttgcagttactggtggtgcacctactaccaacagacaatcattaaactttcgtactttacattaggtacaattaatactactccgggctataaatgtatagttaattgggatcgactaaaatcattgagttataccaaagataagcactattaacttaacaaatcataaacaataaccctatcgccatctccagggaagatttcatgagcccacttaatctaaagctccatccttgacgttaatttagattgctcgtaaaaaaaaaaaaaaaaaccctgaaattagaaaagataacactccttagttagggattatcacatagccaatgaataaaatcagcaaaccttgcaaccaatttgaatttgtacagagaaaaggaggatgcgtagggcacatgtgatccaaaagaacgtagccatcagcatatgcctgctagcatatgcggttccctgtagaagttcttgtaggagtaacaatgcagttccctgagatggagaagtttctgaaaattgtaagaattagagaaacacggagtaggagaaactaaatacacatagctacggcatagatataaggtcacagttcgttatattaggaaagagaaggaaaaaaaaccataggtttcaatttctgaaatcattacaaaaatcaattcctatcaccaaaatctcttcttatttagcaaattcttcaagttcaactgaaatcaacaaaaagaagatggagatgtcgcaaggaatttctcaagtatgagaagaagcggtggctcacaaaatcactgttgacgtttgagaagaagaagcatatgacatgttatatggaaacgaaaaggaagaagaggagaaaaaaagattagggtatcctgcaaggtttcttatggacggatctatctctcaaaacatgatgagttttatattcatgatgaagagagtatatgattttcattacggaaacaggatgttcgtccttattacaaatcaggaaccaggggatccgaggtacgaaaatatcgctccctcaactttcaatccggaccttaggataacgaaatcaatgatcagatatatccggatagacagaatacacttccttttataatatatatttacgaactaaaaaataattttatgttgcgtagtaaattaccagctttagtagcacaaacaatttaaatttggtgagacttttgggattctgcgctgaaagtcgttacagactactggaatgtggaagaaacttctaaaatggtgttgactgctaatggggtactgttttactgagggtgtaccgatatgcatataggaaaaagaagcattttattttgggttgatacgcccccaagcaaaagggtacctcattagcagccttgacattagtgggtaggtatgcagttgcaccccttcaagtatgagctcccaggcccaatttaaattattttaccccacctttagccattttaagccctttgcatccctcgaatatattcacattgataactttcccacccactcttcaaaagctagctaattggagctgatgcacgagtcaaatggtcttcaattcaataaggctgaaatttagtagagtcctctttgaaatttgactgttttgttgtaggatttctactaacagcaattgtggtgtgacacaatgcaaagatttcctttttaacggatagtactagaactagattttgggaagaccagtggttaggtgatactcctgtaaaaatttccttttccaacctatacaatgtctcaaggaagaaaaacaatgtagtcaaataattttatagcagaaacagagaagggtagtcgaaatggtacctggacttgaggaggagaccattaaatattgagatagtagaagcagagaaactatctaacaaaatgcaacacgtgacactgagtgacgtcaaaaaacagaaaatatggaagtgggcaacatgcggagcctttacgatacgctcctgctattcatctctaattccttccccgtccttcgttgactttactcacaagattattcgtaataataatgtgcataccaaagttaattctttttacgtggttggtctatcataattccttgctaactcaggatattctagaaaagagagggagaacgttagtaaacatatcttatatggggaaaaacaagattgcctgtcagttgaaggttttctgcgatatttagagtactattatggtatcaaatttaacctcgttaaattctcgtttcttttattctagtttgtggttatttgcaatatttagagtactattatgtatctgtgctaaacgttttcacggattttagcataaagttcactgatttcgtaataaaatatgatacataagtacacacttcttttcccatgtgaggaaaagcaatgagaggggccgttggcccatacacattgtgcaaaatgtctgaataataatctttatgtttaaaaatgaacaatttgtgatgctaatttgttcaagcctaaaacgcactgcagactcaaatataattctttcatggcaaattaacacggtaccttttttggcttccacaatcacagccagcttctcttaacaagaacttgatcgtgttgatttagttgttgattatctttgaccatttggtaaaatcatagacatcaaactagtagctctgacccttcgttcggtgaaaagataaatgcgtgactcataaaaactgtgcgcaatacatattaagtatatataagatcatccataagagagaaagaaacacaagtactacccattctgaattttcgataagaaattgattcattaattaatttagaaaaatcatggagaaagcaaaacttatgaagctaggtaatggtatggaaataccaagtgttcaagaattggctaaactcacgcttgccgaaattccatctcgatacgtatgcaccgatgaaaaccttttgttgcctatgggtgcatctgtcataaatgatcatgaaaccattcctgtcatcgatatagaaaatttattatctccagaacccgtaatcggaaagttagaattggataggcttcattctgcttgcaaagaatggggtttttttcaggtatatatgtcgtaaatacaagcattgtgattgcatccagtagttgtactttgttacactaaatattagctagtgaatcttcctttacatatatatgttgcaggtagtgaaccatggagtcgacgcttcattggtggatagtgtaaaatcagaaattcaaggtttctttaacctttctatggatgagaaaactaaatatgaacaggaagatggagatgtagaaggatttggacaaggctttattgcatcagaggaccaaacacttgattgggcagatatatttatgatgttcactcttccactccatttaaggaagcctcacttattttcaaaactcccagtgcctctcaggttattactaattcataatcggtttctatgcacttgactttttaatctcacattttcatagtcggtttctgtgcacctcactcagtttattcctattctttttttttttgtttggcccacacatatttaacatttagtccaccttgttagaatttcagactataaatcattctttacaattccttattagctgtaaccatgttgtatgtgaacatatttaatattttatgctgatatataattctgtatatgcatgctctagaattatatattctaccacttgtaggaagatacttccaattttatcttctcttattctttaatgatggaaaatttctttttaaacaagagctagaacggagtacacctcacctcatgccaggaaagacatatgtcattcaaccttccatcaagagttgaaaacaacctcacataggattatcataactagtatgtcattccaaatagtgtaagagacatttgtccttatgtgcccttaaacatacataattaacataaacaaactttaattcattgattagggttagtactaatcaagtttaaaggaatacaaattatgttttactgctgaaccaacataaaaaactgacacacctaagtctccctatttctgcaaaaaaaattatccctcttgatattattttctggttcccccattgaccaataaacatgcaaaattaacactctttaaaagagtatgcatgatagagcataatattttcctctctttgaattttctcagtgatgtgattggatacattaatttggttggtttattatagtttttcatatgattatctaatttacgtacagggagacaatcgaatcctactcatcagaaatgaaaaagttatccatggtcctctttaataagatggaaaaagctctacaagtacaagcagccgagattaagggtatgtcagaggtgtttaaagatgggacacaagcaatgaggatgaactattatcccccttgtcctcaaccaaatctcgccatcggtcttacgtcgcactcggattttggcggtttgacaatcctccttcaaatcaacgaagtggaaggattacagataaaaagagaggggacatggattttagtcaaacctctacctaatgcgttcgtagtgaatgttggagatattttggaggtatttatttaagctggggtaactactggtccttgtttcgaatactggttttgcctgtacccagaaaatttcttattgttttttcttttacagataatgactaatggaatttaccatagcgtcgatcaccgggcagtagtaaactcaacaaatgagaggctctcaatcgcaacatttcatgaccctagtctagagtcagtaataggcccaatatcaagcttgattactccagagacacctgctttgtttaaaagtggatctacatatggggatcttgtggaggaatgtaaaacaaggaagctcgatggaaaatcatttcttgactccatgaggatgtgaaaactcaagaacacaataatacgaggtgattgcatgtcagattcaactatccttttgtcgttttttggtgctcgagtccttaattgttttcatcattgcttttgattctaattaataagacttttctcaagaactctcatgtaatgtacctttaatttcagaaaataaaacgtattgaggcacaaatgagaaaattgacagagtgcttgagaagtgtaatttctcgaaagtgcgttgtgtttgtgttttgttatttcttcaagtgtgtactgatcttagttttgttcgtgttctcctattgttactaattttttcaacgaggttctttcttttctctcgtgatttaatcgtatatggtgcaccaaccagttatctatactttggagcacttataaaaccaacccgaaacacacagacacaacccgaaaccacacattaaatgtctcaccttgagtaagatagcttgagcactgggagaactcgtacagaattggttaggtacacctgaatatcttagaacgagaaacttataatggcaaagttgagaaggtttactcgcttaaaccggtcggtattctacttttaagagatgcagagaagtatggtatcgatgatactaggcatgactcgaaaatatttcatggttgcatcgcaggatatcaaagaagttttaggaaatggaagtgcgaatgcatttgagaaagtaatgggaatggatagtggaagtatttaaaaagctacaaagcttttggattctcttgttgatgtttgtgaaggaaatgaaacaacaatcatggaaatctataaagcttttccgcatataaaatgtacactttatgatcttcatcatgttacttctaacactcacgatcaccctaacatcgaaaaagttctcggtgatatatgttcaactctgttcccagcgctcaagatatcttactgaagatgagacatttaacctaatactcttctaaagatgaccctctttttttttcttttttttttaaagatgacccttcatcttgcatgactggaacgatgaacactgtgtcaagattctaaagaagtgcaaggaagcaaggcccaaagagacgagtaaagtaatcatagtggatgtagtacttctaaaagaatctaaaggtgaactcagaaaggaaagattgattccagatcagtgttttaagaatcggaccggccgattggaccagcaaccggtgaaccaataataaaaactatccggttcaatattgacccactaacatgtcaaaaaacccagtaaaaccagtaaaccggacggttgaaccagtaaccagtgagacccagtccggtctaaaaatgggttgatctaaaaaaaaaaaaaaagaatttgtacatgacattctaaagaatcgaaacattgtatcattccattaaaatcactcaaacatggacacttcataaacattggacctgtctaaaaaccccatttatttaaattttttatttatcttctggatcttcacaaaaactttgagaatctttcaagagttttaaaagcatcggtatcacttcatcagaaaacagtacttcagcacaagattacattttattatggaatagtaattttgatgatgaattttggatgtaatttagacttttctacataaaaaacaaataagaaaagctcaattaaacggagaagagataaaatcacaaaaatgtgcagttggtgatagtttaaaagtaaccaaagaaaattggtcaaagagtgtgaaagaggaacagaaagagacactgaaggagcaagagagacgtaaggagaagggatggggactaaaatgagattaggtattaaagtgttgcttctgagaattgttttgtccacacatgacacaactaccctttgacacgtcctagcattttttttgcctactaacccaacttgatgtctcacattcgacgtgtgtacaataaactgacaaccatcaaatatagttcgagacattcaaatctagaatgtagattattaacttctgacccagtgaactccgattgaaccactgattgacccagttaaccctgacccagtgattttactgggtcaacgtcccgtcctgttttcagaacactgttctagatatgtatatgatggtgaatactggtggtagggggagaattgcaaatgattgggaagttttgttcagaagtgcagggtttcggtctcataaaatcagacccattcgcgttattcagtctgtcattgaaaccttcccatagtaaaattaattaatctcaaaagagtactactttggttatttcactaggaagtgtgtatatataatgcgattcacgtgtcaacaataagtcaccttcacttgaggagatggttccggtgtttttttttttgaatcgtatatcaataaactgaattccttaatatttcaggtaccattatatcatgtataaaaataaaataaaatttgtggtatagtgataaaattgttaggtggtgatacaaattgtctgagttcaatactggctaatatctgatcagtatggggactaaaataaataaaaaacacaatgattaaaaaagtaagaggggactaaaataaataaaaaacacacactgattaaaaaaagtaagaaaaaacattggcagcgtgatgtggagaggggtcaccaaccaaatggagagtttttataaaggaatcatgcataatgcataaaggggatagaattagatttcgggaagaccagcggttaggtgaatgaactgcaggagatgacataaaggatgctttcaaagacagatattgaaaaaatttactataagtggaaattttattaatttaaaacatcctaccttatgccatttgttgcaacaactagagagaatgtaataaaccgatgttcgtcgcagaggtaaaagataagtacgctccaaagatcatattagatattgaggagaatattttggaccgatctcattcctccaaggctatagacaacattagatttgaaatgttagtcttaaaatgggaagaactatttcataggtaattgtatggctgtctttctgtaactctaactttcacctcggtccattatgggataaggtatcgcaactctgtgattatttatccatataaatttgtatcgttttatgtcatataactggcttataaaaggagtactactttgcttctttctctaggaagtgtatatataatgcggttcaataagtcatataactgtttgtatcaacaataagtcatcttcacttgaggatatggttcctattttcccgtgttttgtttttctaaactgtatatcaataaattgaattccctaataattcaggtatgaatatcatgtatcaaaaaaattatcatagtagagtggtaaagttgttaagtgatgatactagcaatctgagttcaacactcgctagaatcggaataatgtggggactaaaataaataaaaaagcacactgattaaaaaaaattaaaaaaaaaatggcagcgggatgtgtagtggggtcaccaaccgaacggaaagcttctacgaagggatcatgcataaagtagataaatatatagaactagattttgggaagaccagtggttaggtgatactcctgtgaaaattgcctttcccaacctcattttgaccaaaacatgggtttggtctaacatttgtccaggctttgcgtttggtctaaagaccaacgttgacccgtgttgaccgtgttatatcttgacttctgtaatataattattaagaatttaaaataaaatttaattattaatccaatttactattttatccttcccttgattaatattgaccgaaagttgtatgaaaagtagaaaaacgtttcaactattccgttcagttgctaatacaatcacgattcaccaaagttgattgatcaatcgattgtgctcactttctcaagacttcggattatccccattcagccaacacataatccatcaacaaacccctgcaatcatcaccccattcgatatgttgctgtgtttctttttcaatcgagagcttttaatttcagatcacatacagacacccaaatactgcctccgattagttcttccttgtacataacacccgatccaaaatcccatggaagacttcaagtacagccaacccaatcttccccaatcatcaactaagaattactgataatcttcttcattcatctttaatttcatcaacaatacaatcacattttctccctaaatatcattggaagcaaatattttccattctttgttttctctgccactatacttctctgtcttgatctttccatgactggcacccatctgttaaattctgaactatgtagtttcaattcccaccaagccaaaataaaacgggcgaaccctaaagaaatgtgaacgacatctgaaaccctagatttcaatcattatttgttccctccctgaaaccgagatggcggcaccataagtgttcagataaagaatgagaaatcgagagattaagggaaatgattaggtttcgagacagcggcgaagctagaaactcaactaaggggaagcaaaattccattaggggtagcaagaaagcaaaattaggcttgtgaaaaaatttgggcttgaaaattaggcttggaagaccaaagagttgcgacccttattacattctgcatccgccactggttcgagattagtaagaaatgggtttttcagacagtaattctttgttgtatttgtgtccgcaactgaagtgaaagaaggagatgcatttagagggacttgaggtgatattggtgttaacaacaaggaattgaagttgggttttctttgaattaggttttaggttgtttcgaagcaagaaatcagggaaagatatgagtaatgacgagcatcgttgatgaaagagagtgagtaatgacatggcagagaaaccaaatgcgatttttttcagatctagttttttgaatttttctcatggattcgtctcatctttctttctgaaattgatctaatgattatcttaactcaggtctttgatattgaatcaagcattgattcgtatgattttccttctctaatcgaatcatacggttctaaggagggtagttctctaaaccctaaaaagaatgaaaattctcagagggtcggtgatgatgttgataatactatgatttcaaacaattcagagattgtttcaccagggaaagaggttagagacacaaattctaatggaacaattgggtctccttcaaaaatgggttcttctaaccctaactctaaaggttggagaactttgtttccttctacacagccaattactcctcatcctcctatgaaattattttcatctactgagctaaatggaaagaaggtggtagattatgctgcagttgatttctcggcaggaattaaacgttgtgaagaatatgtggtggccttctgtgcggggaaaagattatcttttccagcagtcaaaaaagctgtagacaaccattggaaactcaagaatgaggtgagcatcaaattacatggaaattgtgcttttatttttgagtttaaagatgacgaggatcgtagaagagtttccgaataaggatctttttacatatcgaaaagtctttttacagtgagaccatggtcgaatttgctagaatcgtcaattgctagcatcaagtcagtacccatttgggtgttgatttgtaatgtgcctctgcacatgtgggatattgacggattaagtcttatctcaagtttcataggaaagcctatattagtggatgattaaactctaaagaggacaaggctatcttatgctagagtttgtgtagagatagatgttgacttcaattatccataaatcataccattaatgatagatggaaagatttctttagaaatgcccgttgagtatcaatggaaaccacctaagtgtgaggtatgtaaggtttttggacattcctctaaaaactacacaaaaaagttgaaagctagatggtcttctaaatcaaaaggtatgggaattcaagatggagacaaaaatcatctcaatgcacctatcaatgaccatcatctgtctattgtggatggtagaagcgtagatgggattgaaacggttgatccaattattgtctctattgcaaatgagagcgcaacaattgatccaccccttgtgcttgaacaaccttcaacaaaaaatgagaccaatgtcaaagatacaagtggagtttgtaaaaaatggatggagcaacagtggaaaaggaaactcctataaatttaacttcaacatctgcagcatcgtaaaaggctacagataatgggatgattcacaaacctttctattttcctagcgacttgccttaccaatggaaagatttttctgacacggctgctcaagctacagtaacaaagtcagttcaagttaattctacaaagagtctggtcaggactgctagcattcagaagagtggggaagtgaaacataatctctttcttgtaaagggacacggcaactgggagacagtttcaagtcggaaatctccaactaagactcaacagagtggtgaagggaaacataatccctttcttgtaaagggactgggaaattgagagacggcctaaaggaagaaatctcctcccaaggtttttgcgcctaataaggatggtcatatcaaaactaggagcatcgacactcctgtcaaagtgaataacactttcaaagtgttgagtaatgtacacaattctcaagttgaagatagagttataatagaagagtaccaagaggatagtgaagaattttatgatgtagaagcggatagatatgctcaacatttggcttgtgaagacaaaactagtaagaaaatgaaaaaagaatgttcaaggcttaaatggaatggtgaaatcccaaatgaaaacttcggtaaaggccaacgctctgttgctaggaagcataagtaacttgtattttccttttggtttttcagcttaggttttagcctgctgaatttgctttgtgcttgttttaggagtcggcttttgtcgctctttagtttgagtttctctgttgtcggtgctggcgttgccttccccgttggaatcgcttaggcgctcctctcctttttctgtttctttttatcatcaatatattctcaaccttttaagtaaaaaaaaatccatttattttttcattactttttttatcagaaaatttttctattgttgccgtggccagacaggaaaagcatacacgatgtgaaccggacaaccccatcaatattgcctctgatatggacaatcattatgttttcaagaccaaaaaacatattgatgcagaaagctttcttctgcacaactaattacttctgtgggagacaaattgtataagctttcttctgcaacaatctcctaagcttttcaaaagggaaatcctgaacttagttttgatttgtataactatagattgttgcattatatcaattacaactctattgtagcgcaagaatcatgatcataaatgttctcccgattgcctccggtcaaaccacctagttaaagttcgaatattctagctctcaatcagtgaagaacttacactgtgtttccaagttatagaagctactaagaataagagggtagttgtgagtgcatacagaaatattggaactgcatacagggtagttggaactgtagttgtgactgcatacagaataagagggtagttgtgaccagctctcaatgtcgtcgtgtctttccccttttctctctgaaacaaagaagaagaagaaaaaactactttcttccaaaactcaattccttgatccgtccggttttgatttgatttttcagatctaccggacagatcgagtttgtgtccttgtatatattaattttccaacaaaaaatattatttctaaataatttttacggttttctgataggtctaatggtttcacaaaattatcaggacctgttttcatattttctaattaggttattttggtgggtttggatttgcattgctctggaagaaaacgacctacttcgtcaaatatggagatcgtttctaaagaaattaatttgggcatattactttccttttatggaagcatctgatcatcaagaaacaaaatggtttaaaaccattataaggattttcaatccttcaaagagctgcagaagtttaataggattttcatatttcgtttctttaagtttcgattgtaaatcttgtaccgtctgtgttgtcctgttcattgatgtaattgatcaatgtaatccttctaacctcaatttgaatgaggttttctaataaataaaatttagggttttcttgaagcccctttttccatcaaaaaaaaaaatacccaaaaacataaggatagtactttggggacttcaaatgaaatttcaaaaaaaaaagaaaaaaaaaaagctattctaagaggaaaaaaataggccattgatggtggtttcgcccgtcactatttggacctccaaatatccaccagcacccgtcatgcaaactccaatataataaatcatcccacaaagttcattcttcagttcataagatatcctataactttcttgcaaattcaaaacataattaaatcgaacagaaactagaagaatagataatttttaaaccaagaacatcggcgctaatgatgaattgccttcagtccacaatacaagatgaaaaggatactgctaacgatgtccaaatgttttcaacaacatttgatatgttttattacaattaatccaacatggataaaaaattcagaaaacaacttaaacaaaacactcacttcaaacagaaacatatagaaagaatccacataaaggttcatgcaacggaagatccatctgcgtactaacccgtacatactttagaaaatatgatatcaaagacttaatgaacaaaattcgtaactcaaaaaaatctcttgtattgatgtaaataaactcatggcttaacagcctatttatagtttaacaaacttgactctcaagcaaagactctttcctaacaaatcaaattctaaaacaagactcttctagaacattctaaactctatacgtaaaacactatacgtaaccaaacattaaaactgggaaacttgtttctcaagtttactacacgttcacaataacgcgtaatatctcctagtgattgtttccattgatgacaccaacttccactggttgctttcactcagacagtagcaactccacttagttgcttccacaatatcatgtcaacttctctaagtttcttcctcttaacagcatcaacttctactagttgctttcacaaaatatatcttggtttaatcttcaacatcctcccttaaaccaagatattctttactaatcattccaagttttccacgcaaatagatgaaggtattagacttcaaagacttggtaaaaatgtcagccacttgatctttactttcaaaaaattcagcagcaatctccttattgctgacaagctctctaatgtaatgatatttgatatcaatgtgtttactccttccatgaaacacatgattctttgttaatgaaattgaggacttgttatcacatattattgttgtaggtgtaatcttctcattgaaaaaatacttcaacatcatccttagccatacagcgtgtgtatcacaatttacagcagctatgtattcagcttctgttgtagacaaggaaacaacttgttgtttctttgatgaccaggaaaaaaatcatgttcctaaaagaaatgcataaccagatgtaatcttccttccttctgtgtctccagcccaatcattatctgtataaccaaccaattttggatcttcagaaattgtataaagcattcccaaactaattgttcatttgacatacttcaaaatcctctttgcaacttgtagatgtgactgtcttggtgactccataaacctactaactaatccaactgcatacataatgtctggtcttgtataagttaaatatctcagacatccaacaagactcttaaaatatgttgagttcacaagttctcctgattcatcttttgttagcttcaacctttctttagttggttttcaaattggattacaattatccatcttgaaacgcttaagtattccttatgcatatctctgttgattaataaagatacctctttcagtttgttgtacttcaatgccaagaaagtatgacattaatccaagatctgtcatctcaaactctttcaccatatcctcccagaattccttgatcatctctgagttatttccagtaaaaataagatcatccacgtacaaacaaactataatatgattgccaaatgaatcagctttcaaatacagtgtatgctcatgtggacatcttgtaaaactttctcaataaagtatgaatcgattcttgtataccaagcacgtggtgcttgttttaaaccatacaaagccttttttagtttgtacacttgattctacttcccctccataacataacctgctggttgctcaacatatacttcttcttctagtacaccattcaagaatgcactctttacatccatatgaaatatcttccattgcttctgagcagctagagaaatgatcattcgaactgtatcaagtcttggaactggtgcaaagacttcagaatagtatattccttgtttttatctatatcctttagcaactaaccttgctttcaatttatcaacttcaccatctgatttttactttgtcttgtaaacccatttgactcctattgatttctttccttctggaagttctgtaagttcccatgtattgttcttctttattgagtttatatcagcttccattgcttgtacccatccattatctttagaggattcttcataaacaacaggatcacaatctccatataaagcaaaattaatcttctcttcatcagtatcatcatctcttgttatcacataatctttcattcttgctggtataacatattttcttcttggtcttgctgtctcttgttgtggtatcacatcagttcttacctcttcagttgttgcgccttctgttcttctttcttcttgttgtttaataacttcatcttgagtatttatttgttgttcaactgctattggaactgttctgacattttctcttgttgagctggttgcattccgattccactgagagtcttcatcaaagattacatctctattaataactattttccctgttaaaggattgaaaagtttatatcctttggttactgaactataacctttgtcatctaccttatttctaagttctttaggtacatgtgcataagcaatgcacccaaaaactctcagatgtcttacacttggtcttgcacctctccaagcttcttttggtgttttattattcaaactatttcttggacatctattaagtaaatacaatgatatatcaactgcataactccagaagttctttggtaaatcttttgttcttcttataattcttgccatctccattattgttctattctttcttttctgcaacaccattctgttgaggtgtatatctagctgttaattgatgtagaatgccatgttcttccataaaactatcaacaactgctttagcttgcttaatatagataactctatccatgagagattcatgaactcctagatgaagaatataagttgttgtagaattgttcttcctgtttgctgttaaagcagtttgttattcttccgttaaaacaactccttctgctggttcagcataaccatcttttacaatatcccatgcttcttgatatatgaaaatattttccatctgtaacctacagtgttcaaaaaatttccttcaaacaccggcaccttaattgaacttaaacttgatgtcatcttcttaatcaacaactcatacccacaaccctagaatctgataccagtgctctgataccagctgcagaaaatctgatatcaaagacttaatgaacacaattcgtaactcaaacaaatctcttgtattgatgtaaataaactcatggcttaacatcctatttatagtttaacaaacttgactctcaagaaaagactctttcctaacaaatcaaattataaaacaagactcttctagaatattctaaactctatacgtaaaacactatacgtaaccaaattttaaaaatggcaaacttgtttctcaagtttactacactttcacaataacgcgtaatatctcctactgattttttccattgatgatagtagcaactccacctagtttcttccataatatcatgtcaacttctttaagttgcttcctcttaacagcatcaacttctactagtttctttcacaaactatatcttggtttaatcttcaacacgtacttatttgatgagttcaaccaccagaggaatctcatcatttcatcaaagaagcaagaaccaacatgaagaaggctgcaataatcatttcttgatgatagtttagaaaatacttaaggcgcttcaattcattctctaacgcttttcatttattactaacctcatcacctaatttaaactgatgaagtcagtaattcacgtagttcctgaagataaaaccatctgttgcgatccttgccggttccccaatgcaactgtacaagagatctttttcttcttgttcacatctctctatttccgcttccttaaatgcaatattcgtctccagaaaattaaccatctcttttaacatctctgattgcagagatgtttattcatcttgatccttagtgttaatctctgtttcagtagattctgatgtcaccgccccaatagtactcgattctctctggttaacttcttcatctgcgtaatcataataatcattatcatcatcatcgatagtaaaactccattctccaaatttatatcttttatataaccaattcatattttcgtcgtctgaatcatcagaagatccagaacgacttatttgttttcttttttgatcaggcggattatattgcattttctgcaaccattggaacaatagttttctttttatgatgagaatcttgatatttagagcgatgtagaaaacagagactcagcaagagcaattcgattgcatcgtcacgtagaacggtcttagtatttagttggtcgtgtcatattatagtatacactaattatccgggtcactgtagcgtgtttaattagttggatcatagtatccggatagggccggggcctacgtccgcggccttggagaaaatttaaaggaatatgtagtgcccacattaaaattcgtatgttagttggtcctgtctataataaccgggtcatagcagaatggtcctcatatttagttggtcgtgtcatattttagtatgttagttaattagatcacagtagcgtgtttaattagttggatcatagtagccggatagggagaaaatttagaaaatttaaaggaagacataatacccacatatctagtttgtcttaacatattatagtgtgttagtcgggtcacagtagcgtgtttaattggttgcatcataatagtcggatagggccggggctgccccttaaatttttagggaataatatctagcattaaagttagccgttttcaattgggcaaattacatcaagaaatctaattgtgaaaactacagccacacccattttccagattttggacactgtgaaacccacgggcggaaaagtttatgcgcgcacccaattttcgtgagaaaatttctcccaaacccacaatttataaaatttggtttcttcgtatttttcttcttcttcttcttcgtcacgcgaacttcttcttcaattctttttccttttttcctcccaactgtgacttccgatcagtaatattgaatattgatagacagtataatcacaagaagattagaaacaatagatgaatgaaatcgaaagttagggtttgaggtgatgttcctagatgaatcaagatcttgttatttgttatttccgaaagatgtatgaatgggtttttttttaattaggtattatgattgaaaagatggacctgagatgtgttctgagatggagatagggtttgtaattgtttcaatcaagtagaacaggaagaaaagttgatttgagatttagaaaatacagggaataataataaagcttatttgacatgggataatgaacaacgaagaagaagatgatgttgttatgactgcacaacatgtcaagcagtcgagaaaatatctgcataaacttttatgcagtcgaaaaatggatgcataacacattatccgacatctttgttattttgtgtgaaattgaaaattgatgcataatgcatcatggagtcgagaaaatggatgtataacctgatatgcatccaaaatacggctgcataatgcattatgcatagagaaaattgttgcataatcttttatgcatcagaaaatggatgcataacctgatatgcacccttaaatatggttgcataatgcactatgcatcaattttttctgtacgcactaaaatcaaccaaaacaatggctacataacttgttatagacgcataacttgttatgcagtcgaaaaaatgattgcataattcgttatgcgtctgtataatgtgttatgcatcttttttggaggctgcataatgaatatgtaatcggttttcgaaaattttccctaaaacgatgatcacctccgattttttcgtgaaaaacaaaaatttgatattattgtttgtactcgttgtgtagctcttttaaaaagattttcaacgatataaaatttataaaatttcaaggcgcggttttttaaatatgttatatccaagttggtaagcccctgatgcataacccgtcatgcggatgcataatccgtcatgcaaacatttttaataatttcatataattatggatgtcacggaactaaaaattaattgtggacctgacaatgagaatattgttttttttggacctgcgcctaatttccccaatttaattatatttgaatacttggttgcgccaagcctaagttagcattgatcatatcatgctattatttatttttatttctttgttttcaacggaattgcagaccatatttgtttgatgagcaatttgtgagagttatcaaaacttgtcacttacaaagagttatataagccgactcttattaccacttaagttgggaatccgtgaaatgacaaaaattccaattccttgccgtatccaatcttaggaagcccattaacgtaattagtttaaggacaaattaaaatacagtcacagtattaagatgcggtttgcaaaagcatcctactactacaaaccattaacaagatggtcctacttccgttaaaagcaaggttatgtcactgggacccactggtgcaagagttaaatgcactggcaattttacgagtttgcccttaaccagaccgggttaaatctagtaccgtatatctcatacggagtcatcttgatgactaaatatacggccaagattatggtcttagagtatatccttaacctaatgaatttagatctactaccatacatcttacaattgatgcatctcgagatgaaacagacggataggatcagaagttggaacactcgatctataacagtttagggttcaggaaatgaggcaaagtcatttcatttcgtctcagccatctctctctaaattttctgcagaaatggcgatacactcgaaaacttgagattttcagtggtttatgtcgcaaacagatcatcactagattaggctggtagtgttaatggttttttatacatcttcaatgcttattcgtgaagattagagagcaaagaaggtaactggtggtcaaacggcggtggttttcttacaagatttcgtcactatgtacgcgaatataatgaggttggtattcataaccatagactgtcaatttcacattagatttcagtatccctaattggtcgatttttttcaacttttataaaccctaatttttcaaaattgggtattttacaaattcagtaatttggtattttacaaatcgatttagtaaaccctaatttaggactgttgttatgttatctcctacaaatcaattcagtaattcggtattttttctgtccatttagtgacccctaattgaggaaaataggtatgttatatattactagtcacatacttatattttgaatttgattatgtgtattgcaggaagtctgtgaagaacccagttagaagctttagggttgaggaaaatgatacaaataagattaggtattttgataatataagtgtgaactgtggtggattgaatggttttagtgatgttgttcatgctgcatatcagttaccccctattaagaaggttagtctgacctggttcagtgacacagacccaaaaccaaaaggaacagttcctgctgctgctactcaataacttcctttctatttttaaaacacttatgttatgttatgggcctttgttctctatgttttggactgatgaacacacttatgttatgttatggtcttaatgtatgttaatattctatgttattttgatggtgtcatgatcatgaaagtttctttttatttaaagtgtagctcattacatttgtagatcttctatttccttgcataattctgtcattttcagagatgtttttcttacatttgatctagctgcattgaagacaacatcagacaaccattgaaaatcaagacagttggagcacttgaggtaagcaatattatagttgtgtgcattctggcagaagaaaagcatcacagtttccttacacttcttcttcttgcagtcttggttcttccatggacagttgttgtgcatatgactcttgtcacagatcagatcttccacgtttgcaaaccacgtcagccacaggttaactctagttaactgggttttgttaggatagagggcattttgggaacatttaacaccgtttttttgaaaaactgttatgtcgcccaaagtgtgactgttttgtatacgatttataaaagtatgatcaatttataaccaaattagaaaaagtatgaccattttgtaattggctcttagtttaatttccatggctgccactaactccatagccatcgatcttggccatcatgtacagtggggactcaaggtttccaccaggttttccatcgctgccactaactcctttatgtagagtatctatgcttcctaaggttggatacggtaaggaattgcagaccataataaactaattacttttatggtctccctgcactcttcctttatgcagtatctatggtgactccatcgtgcatgctctctctgaaaaaattgcaaatgcagatacatgttagttcaccaaattgcaaatgctgcatgttgttgcagttactggtggtgcacctactaccaacagacaatcattaaactttcgtactttacattaggtacaattaatactactccgggctataaatgtatagttaattgggatcgactaaaatcattgagttataccaaagataagcactattaacttaacaaatcataaacaataaccctatcgccatctccagggaagatttcatgagcccacttaatctaaagctccatccttgacgttaatttagattgctcgtaaaaaaaaaaaaaaaaaaaccctgaaattagaaaagataacactccttagttagggattatcacatagccaatgaataaaatcagcaaaccttgcaaccaatttgaatttgtacagagaaaaggaggatgcgtagggcacatgtgatccaaaagaacgtagccatcagcatatgcctgctagcatatgcggttccctgtagaagttcttgtaggagtaacaatgcagttccctgagatggagaagtttctgaaaattgtaagaattagagaaacacggagtaggagaaactaaatacacatagctacggcatagatataaggtcacagttcgttatattaggaaagagaaggaaaaaaaaccataggtttcaatttctgaaatcattacaaaaatcaattcctatcaccaaaatctcttcttatttagcaaattcttcaagttcaactgaaatcaacaaaaagaagatggagatgtcgcaaggaatttctcaagtatgagaagaagcggtggctcacaaaatcactgttgacgtttgagaagaagaagcatatgacatgttatatggaaacgaaaaggaagaagaggagaaaaaaagattagggtatcctgcaaggtttcttatggacggatctatctctcaaaacatgatgagttttatattcatgatgaagagagtatatgattttcattacggaaacaggatgttcgtccttattacaaatcaggaaccaggggatccgaggtacgaaaatatcgctccctcaactttcaatccggaccttaggataacgaaatcaatgatcagatatatccggatagacagaatacacttccttttataatatatatttacgaactaaaaaataattttatgttgcgtagtaaattaccagctttagtagcacaaacaatttaaatttggtgagacttttgggattctgcgctgaaagtcgttacagactactggaatgtggaagaaacttctaaaatggtgttgactgctaatggggtactgttttactgagggtgtaccgatatgcatataggaaaaagaagcattttattttgggttgatacgccccccaagcaaaagggtacctcattagcagccttgacattagtgggtaggtatgcagttgcaccccttcaagtatgagctcccaggcccaatttaaattattttaccccacctttagccattttaagccctttgcatccctcgaatatattcacattgataactttcccacccactcttcaaaagctagctaattggagctgatgcacgagtcaaatggtcttcaattcaataaggctgaaatttagtagagtcctctttgaaatttgactgttttgttgtaggatttctactaacagcaattgtggtgtgacacaatgcaaagatttccttttttaacggatagtactagaactagattttgggaagaccagtggttaggtgatactcctgtaaaaatttccttttccaacctatacaatgtctcaaggaagaaaaacaatgtagtcaaataattttatagcagaaacagagaagggtagtcgaaatggtacctggacttgaggaggagaccattaaatattgagatagtagaagcagagaaactatctaacaaaatgcaacacgtgacactgagtgacgtcaaaaaacagaaaatatggaagtgggcaacatgcggagcctttacgatacgctcctgctattcatctctaattccttccccgtccttcgttgactttactcacaagattattcgtaataataatgtgcataccaaagttaattctttttacgtggttggtctatcataattccttgctaactcaggatattctagaaaagagagggagaacgttagtaaacatatcttatatggggaaaaacaagattgcctgtcagttgaaggttttctgcgatatttagagtactattatggtatcaaatttaacctcgttaaattctcgtttcttttattctagtttgtggttatttgcaatatttagagtactattatgtatctgtgctaaacgttttcacggattttagcataaagttcactgatttcgtaataaaatatgatacataagtacacacttcttttcccatgtgaggaaaagcaatgagaggggccgttggcccatacacattgtgcaaaatgtctgaataataatctttatgtttaaaaatgaacaatttgtgatgctaatttgttcaagcctaaaacgcactgcagactcaaatataattctttcatggcaaattaacacggtaccttttttggcttccacaatcacagccagcttctcttaacaagaacttgatcgtgttgatttagttgttgattatctttgaccatttggtaaaatcatagacatcaaactagtagctctgacccttcgttcggtgaaaagataaatgcgtgactcataaaaactgtgcgcaatacatattaagtatatataagatcatccataagagagaaagaaacacaagtactacccattctgaattttcgataagaaattgattcattaattaatttagaaaaatcatggagaaagcaaaacttatgaagctaggtaatggtatggaaataccaagtgttcaagaattggctaaactcacgcttgccgaaattccatctcgatacgtatgcaccgatgaaaaccttttgttgcctatgggtgcatctgtcataaatgatcatgaaaccattcctgtcatcgatatagaaaatttattatctccagaacccgtaatcggaaagttagaattggataggcttcattcttcttgcaaagaatggggtttttttcaggtatatatgtcgtaaatacaagcattgtgattgcatccagtagttgtactttgttacactaaatattagctagtgaatcttcctttacatatatatgttgcaggtagtgaaccatggagtcgacgcttcattggtggatagtgtaaaatcagaaattcaaggtttctttaacctttctatggatgagaaaactaaatatgaacaggaagatggagatgtagaaggatttggacaaggctttattgcatcagaggaccaaacacttgattgggcagatatatttatgatgttcactcttccactccatttaaggaagcctcacttattttcaaaactcccagtgcctctcaggttattactaattcataatcggtttctatgcacttgactttttaatctcacattttcatagtcggtttctgtgcacctcactcagtttattcctattcttttttttttgtttggcccacacatatttaacatttagtccaccttgttagaatttcagactataaatcattctttacaattccttattagctgtaaccatgttgtatgtgaacatatttaatattttatgctgatatataattctgtatatgcatgctctagaattatatattctaccacttgtaggaagatacttccaattttatcttctcttattctttaatgatggaaaatttctttttaaacaagagctagaacggagtacacctcacctcatgccaggaaagacatatgtcattcaaccttccatcaagagttgaaaacaacctcacataggattatcataactagtatgtcattccaaatagtgtaagagacatttgtccttatgtgcccttaaacatacataattaacataaacaaactttaattcattgattagggttagtactaatcaagtttaaaggaatacaaattatgttttactgctgaaccaacataaaaaactgacacacctaagtctccctatttctgcaaaaaaaattatccctcttgatattattttctggttcccccattgaccaataaacatgcaaaattaacactctttaaaagagtatgcatgatagagcataatattttcctctctttgaattttctcagtgatgtgattggatacattaatttggttggtttattatagtttttcatatgattatctaatttacgtacagggagacaatcgaatcctactcatcagaaatgaaaaagttatccatggtcctctttaataagatggaaaaagctctacaagtacaagcagccgagattaagggtatgtcagaggtgtttaaagatgggacacaagcaatgaggatgaactattatcccccttgtcctcaaccaaatctcgccatcggtcttacgtcgcactcggattttggcggtttgacaatcctccttcaaatcaacgaagtggaaggattacagataaaaagagaggggacatggattttagtcaaacctctacctaatgcgttcgtagtgaatgttggagatattttggaggtatttatttaagctggggtaactactggtccttgtttcgaatactggttttgcctgtacccagaaaatttcttattgttttttcttttacagataatgactaatggaatttaccatagcgtcgatcaccgggcagtagtaaactcaacaaatgagaggctctcaatcgcaacatttcatgaccctagtctagagtcagtaataggcccaatatcaagcttgattactccagagacacctgctttgtttaaaagtggatctacatatggggatcttgtggaggaatgtaaaacaaggaagctcgatggaaaatcatttcttgactccatgaggatgtgaaaactcaagaacacaataatacgaggtgattgcatgtcagattcaactatccttttgtcgttttttggtgctcgagtccttaattgttttcatcattgcttttgattctaattaataagacttttctcaagaactctcatgtaatgtacctttaatttcagaaaataaaacgtattgaggcacaaatgagaaaattgacagagtgcttgagaagtgtaatttctcgaaagtgcgttgtgtttgtgttttgttatttcttcaagtgtgtactgatcttagttttgttcgtgttctcctattgttactaattttttcaacgaggttctttcttttctctcgtgatttaatcgtatatggtgcaccaaccagttatctatactttggagcacttataaaaccaacccgaaacacacagacacaacccgaaaccacacattaaatgtctcaccttgagtaagatagcttgagcactgggagaactcgtacagaattggttaggtacacctgaatatcttagaacgagaaacttataatggcaaagttgagaaggtttactcgcttaaaccggtcggtattctacttttaagagatgcagagaagtatggtatcgatgatactaggcatgactcgaaaatatttcatggttgcatcgcaggatatcaaagaagttttaggaaatggaagtgcgaatgcatttgagaaagtaatgggaatggatagtggaagtatttaaaaagctacaaagcttttggattctcttgttgatgtttgtgaaggaaatgaaacaacaatcatggaaatctataaagcttttccgcatataaaatgtacactttatgatcttcatcatgttacttctaacactcacgatcaccctaacatcgaaaaagttctcggtgatatatgttcaactctgttcccagcgctcaagatatcttactgaagatgagacatttaacctaatactcttctaaagatgaccctctttttttttcttttttttttaaagatgacccttcatcttgcatgactggaacgatgaacactgtgtcaagattctaaagaagtgcaaggaagcaaggcccaaagagacgagtaaagtaatcatagtggatgtagtacttctaaaagaatctaaaggtgaactcagaaaggaaagattgattccagatcagtgttttaagaatcggaccggccgattggaccagcaaccggtgaaccaataataaaaactatccggttcaatattgacccactaacatgtcaaaaaacccagtaaaaccagtaaaccggacggttgaaccagtaaccagtgagacccagtccggtctaaaaatgggttgatctaaaaaaaaaaaaaaagaatttgtacatgacattctaaagaatcgaaacattgtatcattccattaaaatcactcaaacatggacacttcataaacattggacctgtctaaaaaccccatttatttaaattttttatttatcttctggatcttcacaaaaactttgagaatctttcaagagttttaaaagcatcggtatcacttcatcagaaaacagtacttcagcacaagattacattttattatggaatagtaattttgatgatgaattttggatgtaatttagacttttctacataaaaaacaaataagaaaagctcaattaaacggagaagagataaaatcacaaaaatgtgcagttggtgatagtttaaaagtaaccaaagaaaattggtcaaagagtgtgaaagaggaacagaaagagacactgaaggagcaagagagacgtaaggagaagggatggggactaaaatgagattaggtattaaagtgttgcttctgagaattgttttgtccacacatgacacaactaccctttgacacgtcctagcattttttttgcctactaacccaacttgatgtctcacattcgacgtgtgtacaataaactgacaaccatcaaatatagttcgagacattcaaatctagaatgtagattattaacttctgacccagtgaactccgattgaaccactgattgacccagttaaccctgacccagtgattttactgggtcaacgtcccgtcctgttttcagaacactgttctagatatgtatatgatggtgaatactggtggtagggggagaattgcaaatgattgggaagttttgttcagaagtgcagggtttcggtctcataaaatcagacccattcgcgttattcagtctgtcattgaaaccttcccatagtaaaattaattaatctcaaaagagtactactttggttatttcactaggaagtgtgtatatataatgcgattcacgtgtcaacaataagtcaccttcacttgaggagatggttccggtgtttttttttttgaatcgtatatcaataaactgaattccttaatatttcaggtaccattatatcatgtataaaaataaaataaaatttgtggtatagtgataaaattgttaggtggtgatacaaattgtctgagttcaatactggctaatatctgatcagtatggggactaaaataaataaaaaacacaatgattaaaaaagtaagaggggactaaaataaataaaaaacacacactgattaaaaaagtaagaaaaaacattggcagcgtgatgtggagaggggtcaccaaccaaatggagagtttttataaaggaatcatgcataatgcataaaggggatagaattagatttcgggaagaccagcggttaggtgaatgaactgcaggagatgacataaaggatgctttcaaagacagatattgaaaaaatttactataagtggaaattttattaatttaaaacatcctaccttatgccatttgttgcaacaactagagagaatgtaataaaccgatgttcgtcgcagaggtaaaagataagtacgctccaaagatcatattagatattgaggagaatattttggaccgatctcattcctccaaggctatagacaacattagatttgaaatgttagtcttaaaatgggaagaactatttcataggtaattgtatggctgtctttctgtaactctaactttcacctcggtccattatgggataaggtatcgcaactctgtgattatttatccatataaatttgtatcgttttatgtcatataactggcttataaaaggagtactactttgcttctttctctaggaagtgtatatataatgcggttcaataagtcatataactgtttgtatcaacaataagtcatcttcacttgaggatatggttcctattttcccgtgttttgtttttctaaactgtatatcaataaattgaattccctaataattcaggtatgaatatcatgtatcaaaaaaattatcatagtagagtggtaaagttgttaagtgatgatactagcaatctgagttcaacactcgctagaatcggaataatgtggggactaaaataaataaaaaagcacactgattaaaaaaaattaaaaaaaaaatggcagcgggatgtgtagtggggtcaccaaccgaacggaaagcttctacgaagggatcatgcataaagtagataaatatatagaactagattttgggaagaccagtggttaggtgatactcctgtgaaaattgcctttcccaacctcattttgaccaaaacatgggtttggtctaacatttgtccagggctttgcgtttggtctaaagaccaacgttgacccgtgttgaccgtgttatatcttgacttctgtaatataattattaagaatttaaaataaaatttaattattaatccaatttactattttatccttcccttgattaatattgaccgaaagttgtatgaaaagtagaaaaacgtttcaactattccgttcagttgctaatacaatcacgattcaccaaagttgattgatcaatcgattgtgctcactttctcaagacttcggattatccccattcagccaacacataatccatcaacaaacccctgcaatcatcaccccattcgatatgttgctgtgtttctttttcaatcgagagcttttaatttcagatcacatacagacacccaaatactgcctccgattagttcttccttgtacataacacccgatccaaaatcccatggaagacttcaagtacagccaacccaatcttccccaatcatcaactaagaattactgataatcttcttcattcatctttaatttcatcaacaatacaatcacattttctccctaaatatcattggaagcaaatattttccattctttgttttctctgccactatacttctctgtcttgatctttccatgactggcacccatctgttaaattctgaactatgtagtttcaattcccaccaagccaaaataaaacgggcgaaccctaaagaaatgtgaacgacatctgaaaccctagatttcaatcattatttgttccctccctgaaaccgagatggcggcaccataagtgttcagataaagaatgagaaatcgagagattaagggaaatgattaggtttcgagacagcggcgaagctagaaactcaactaaggggaagcaaaattccattaggggtagcaagaaagcaaaattaggcttgtgaaaaaatttgggcttgaaaattaggcttggaagaccaaagagttgcgacccttattacattctgcatccgccactggttcgagattagtaagaaatgggtttttcagacagtaattctttgttgtatttgtgtccgcaactgaagtgaaagaaggagatgcatttagagggacttgaggtgatattggtgttaacaacaaggaattgaagttgggttttctttgaattaggttttaggttgtttcgaagcaagaaatcagggaaagatatgagtaatgacgagcatcgttgatgaaagagagtgagtaatgacatggcagagaaaccaaatgcgatttttttcagatctagttttttgaatttttctcatggattcgtctcatctttctttctgaaattgatctaatgattatcttaactcaggtctttgatattgaatcaagcattgattcgtatgattttccttctctaatcgaatcatacggttctaaggagggtagttctctaaaccctaaaaaagaatgaaaattctcagagggtcggtgatgatgttgataatactatgatttcaaacaattcagagattgtttcaccagggaaagaggttagagacacaaattctaatggaacaattgggtctccttcaaaaatgggttcttctaaccctaactctaaaggttggagaactttgtttccttctacacagccaattactcctcatcctcctatgaaattattttcatctactgagctaaatggaaagaaggtggtagattatgctgcagttgatttctcggcaggaattaaacgttgtgaagaatatgtggtggccttctgtgcggggaaaagattatcttttccagcagtcaaaaaagctgtagacaaccattggaaactcaagaatgaggtgagcatcaaattacatggaaattgtgcttttatttttgagtttaaagatgacgaggatcgtagaagagtttccgaataaggatctttttacatatcgaaaagtctttttacagtgagaccatggtcgaatttgctagaatcgtcaattgctagcatcaagtcagtacccatttgggtgttgatttgtaatgtgcctctgcacatgtgggatattgacggattaagtcttatctcaagtttcataggaaagcctatattagtggatgattaaactctaaagaggacaaggctatcttatgctagagtttgtgtagagatagatgttgacttcaattatccataaatcataccattaatgatagatggaaagatttctttagaaatgcccgttgagtatcaatggaaaccacctaagtgtgaggtatgtaaggtttttggacattcctctaaaaactacacaaaaaagttgaaagctagatggtcttctaaatcaaaaggtatgggaattcaagatggagacaaaaatcatctcaatgcacctatcaatgaccatcatctgtctattgtggatggtagaagcgtagatgggattgaaacggttgatccaattattgtctctattgcaaatgagagcgcaacaattgatccaccccttgtgcttgaacaaccttcaacaaaaaatgagaccaatgtcaaagatacaagtggagtttgtaaaaaatggatggagcaacagtggaaaaggaaactcctataaatttaacttcaacatctgcagcatcgtaaaaggctacagataatgggatgattcacaaacctttctattttcctagcgacttgccttaccaatggaaagatttttctgacacggctgctcaagctacagtaacaaagtcagttcaagttaattctacaaagagtctggtcaggactgctagcattcagaagagtggggaagtgaaacataatctctttcttgtaaagggacacggcaactgggagacagtttcaagtcggaaatctccaactaagactcaacagagtggtgaagggaaacataatccctttcttgtaaagggactgggaaattgagagacggcctaaaggaagaaatctcctcccaaggtttttgcgcctaataaggatggtcatatcaaaactaggagcatcgacactcctgtcaaagtgaataacactttcaaagtgttgagtaatgtacacaattctcaagttgaagatagagttataatagaagagtaccaagaggatagtgaagaattttatgatgtagaagcggatagatatgctcaacatttggcttgtgaagacaaaactagtaagaaaatgaaaaaagaatgttcaaggcttaaatggaatggtgaaatcccaaatgaaaacttcggtaaaggccaacgctctgttgctaggaagcataagtaacttgtattttccttttggtttttcagcttaggttttagcctgctgaatttgctttgtgcttgttttaggagtcagcttttgtcgctctttagtttgagtttctctgttgtcggtgctggcgttgccttccccgttggaatcgcttaggcgctcctctcctttttctgtttctttttatcatcaatatattctcaaccttttaagtaaaaaaaaatccatttattttttcattactttttttatcataaaatttttctattgttgccgtggccagacaggaaaagcatacacgatgtgaaccggacaaccccatcaatattgcctctgatatggacaatcattatgttttcaagaccaaaaaacatattgatgcagaaagctttcttctgcacaactaattacttctgtgggagacaaattgtataagctttcttctgcaacaatctcctaagcttttcaaaagggaaatcctgaacttagttttgatttgtataactatagattgttgcattatatcaattacaactctattgtagcgcaagaatcatgatcataaatgttctcccgattgcctccggtcaaaccacctagttaaagttcgaatattctagctctcaatcagtgaagaacttacactgtgtttccaagttatagaagctactaagaataagagggtagttgtgagtgcatacagaaatattggaactgcatacagggtagttggaactgtagttgtgactgcatacagaataagagggtagttgtgaccagctctcaatgtcgtcgtgtctttccccttttctctctgaaacaaagaagaagaagaaaaaactactttcttccaaaactcaattccttgatccgtccggttttgatttgatttttcagatctaccggacagatcgagtttgtgtccttgtatatattaattttccaacaaaaaatattatttctaaataatttttacggttttctgataggtctaatggtttcacaaaattatcaggacctgttttcatattttctaattaggttattttggtgggtttggatttgcattgctctggaagaaaacgacctacttcgtcaaatatggagatcgtttctaaagaaattaatttgggcatattactttccttttatggaagcatctgatcatcaagaaacaaaatggtttaaaaccattataaggattttcaatccttcaaagagctgcagaagtttaataggattttcatatttcgtttctttaagtttcgattgtaaatcttgtaccgtctgtgttgtcctgttcattgatgtaattgatcaatgtaatccttctaacctcaatttgaatgaggttttctaataaataaaatttagggttttcttgaagcccctttttccatcaaaaaaaaaaaatacccaaaaacataaggatagtactttggggacttcaaatgaaatttcaaaaaaaaaagaaaaaaaaaaagctattctaagaggaaaaaaataggccattgatggtggtttcgcccgtcactatttggacctccaaatatccaccagcacccgtcatgcaaactccaatataataaatcatcccacaaagttcattcttcagttcataagatatcctataactttcttgcaaattcaaaacataattaaatcgaacagaaactagaagaatagataatttttaaaccaagaacatcggcgctaatgatgaattgccttcagtccacaatacaagatgaaaaggatactgctaacgatgtccaaatgttttcaacaacatttgatatgttttattacaattaatccaacatggataaaaaattcagaaaacaacttaaacaaaacactcacttcaaacagaaacatatagaaagaatccacataaaggttcatgcaacggaagatccatctgcgtactaacccgtacatactttagaaaatatgatatcaaagacttaatgaacaaaattcgtaactcaaaaaaatctcttgtattgatgtaaataaactcatggcttaacagcctatttatagtttaacaaacttgactctcaagcaaagactctttcctaacaaatcaaattctaaaacaagactcttctagaacattctaaactctatacgtaaaacactatacgtaaccaaacattaaaactgggaaacttgtttctcaagtttactacacgttcacaataacgcgtaatatctcctagtgattgtttccattgatgacaccaacttccactggttgctttcactcagacagtagcaactccacttagttgcttccacaatatcatgtcaacttctctaagtttcttcctcttaacagcatcaacttctactagttgctttcacaaaatatatcttggtttaatcttcaacatcctcccttaaaccaagatattctttactaatcattccaagttttccacgcaaatagatgaaggtattagacttcaaagacttggtaaaaatgtcagccacttgatctttactttcaaaaaattcagcagcaatctccttattgctgacaagctctctaatgtaatgatatttgatatcaatgtgtttactccttccatgaaacacatgattctttgttaatgaaattgaggacttgttatcacatattattgttgtaggtgtaatcttctcattgaaaaaatacttcaacatcatccttagccatacagcgtgtgtatcacaatttacagcagctatgtattcagcttctgttgtagacaaggaaacaacttgttgtttctttgatgaccaggaaaaaaatcatgttcctaaaagaaatgcataaccagatgtaatcttccttccttctgtgtctccagcccaatcattatctgtataaccaaccaattttggatcttcagaaattgtataaagcattcccaaactaattgttcatttgacatacttcaaaatcctctttgcaacttgtagatgtgactgtcttggtgactccataaacctactaactaatccaactgcatacataatgtctggtcttgtataagttaaatatctcagacatccaacaagactcttaaaatatgttgagttcacaagttctcctgattcatcttttgttagcttcaacctttctttagttggttttcaaattggattacaattatccatcttgaaacgcttaagtattccttatgcatatctctgttgattaataaagatacctctttcagtttgttgtacttcaatgccaagaaagtatgacattaatccaagatctgtcatctcaaactctttcaccatatcctcccagaattccttgatcatctctgagttattgccagtaaaaataagatcatccacgtacaaacaaactataatatgattgctaaatgaatcagctttcaaatacagtgtatgctcatgtggacatcttgtaaaactttctcaataaagtatgaatcgattcttgtataccaagcacgtggtgcttgttttaaaccatgcaaagccttttttagtttgtacacttgattctacttcccctccataacataacctgctggttgcttaacatatacttcttcttctagtacaccattcaagaatgcactctttacatccatatgaaatatcttccattgcttctgagcagctagagaaatgatcattcgaactgtatcaagtcttggaactggtgcaaagacttcaaaatagtatattccttgtttttatctatatcctttagcaactaaccttgctttcaatttatcaacttcaccatctgatttttactttgtcttgtaaacccatttgactcctattgatttctttccttctggaagttctgtaagttcccatgtattgttcttctttattgagtttatatcagcttccattgcttgtacccatccattatctttagaggattcttcataaacaacaggatcacaatctccatataaagcaaaattaatcttctcttcatcagtatcatcatctcttgttatcacataatctttcattcttgctggtataacatattttcttcttggtcttgctgtctcttgttgtggtatcatatcagttcttacctcttcagttattgcgccttctgttcttctttcttcttgttgtttaataacttcatcttgagtatttatttgttgttcaactgctattggaactgttctgacattttctcttgttgagctggttgcattccgattccactgagagtcttcatcaaagattacatctctattaataactattttccctgttaaaggattgaaaagtttatatcaaagacttaatgaacacaattggtaactcaaacaaatctcttgtattgatgtaaataaactcatggcttaacatcctatttatagtttaacaaacttgactctcaagaaaagactctttcctaacaaatcaaattataaaacaagactcttctagaatattctaaactctatacgtaaaacactatacgtaaccaaattttaaaagtggcaaacttgtttctcaagtttactacacgttcacaataacgcgtaatatctcctactgattttttccattgatgacaccaacttccactgattgctttcactcagacagtagcaactccacctagttgcttccataatatcatgtcaacttctttaagttgcttcctcttaacagcatcaacttctactagttcctttcacaaactatatcttggtttaatcttcaacgtgtacttatttgatgagttcaaccaccagaggaatctcatcatttcatcaaagaagcaagaaccaacatgaagaaggctgcaataatcatttcttgatgatagtttagaaaatacttgaggcgcttcaattcattctctaacgcttttcgtttattactaacctcatcacctaatttaaactgatgaagtcagtaattcacgtagttcctgaagataaaaccatctgttgcgatccttgccggttccccaatgcaactgtacaagagatctttttcttcttgttcacatctctctatttccgcttccttaaatgcaatattcgtctccagaaaattaaccatctcttttaacatctctgattgcagagatgtttcttcatcttgatccttagtgttaatctctgtttcagtagattctgatgtccccgccccaatagtactcgattctctctggttaacttcttcatctgcgtaatcataataatcatcgtaatcattatcatcatcatcggtagtaaaaatccattctccaaatttatatcttttatataaccaattcatattctcgtcgtctgaatcatcagaagatccataacggcttatttgttttcttttttgatcaggcggaatattgcattttctgcaaccattggaacagtagttttcttttgatgatgggaatcttgatatttagagcgatgtagaaaacagagactccgcaagagcaatttgattgcatcgtcactgtgatctgctaaaacctaccatcaccggaatctatttgtagaggctaagccgtttaccgccttttctttcaaacgacactgcttttggcgctcacgtcttttggatatggggtgcgacgtatgagtgaaaaggcggatgtttttttttactggaggcagcctacgaaaatgtttagagaacacaaccaacgcgacagatgaagtccactgcaaaaaaaacgatcgagacctagccaaaggacgtggcatgtattgtgaaccactggagacagacacattccaacgacagattctaagatatgaaagattttggtcacattgaaaaatgctaattagtgatgcagatgttggatcaggtatcaggctactgtatatacaacaactatgtatcaccccagctcaacctcttcgtcgatttatttgtgttgtatggtttctcattccatctttttctcgtaggtgttacttgaatcatagacttcgtctattaggaacgatctcagtgtttagtaagtggtgttatagtagcgtgtttagttagtcaagtcataaaaacttctttagttagccagagcatagcagttggtttagttggctcaacctttttagagttttgtttattgttcatttgtttggtcggtcgattagaatcttcccatgcaatttaggattctacgttgttttttttttggaaagatttttttagttttctataatagttgggttatagtagaacggtcttagtatttagttggttgtgtcatattatagtatatactaattatccgggtcactgtagtgtgtttaattagttggatcatggtagccggatagggacggggcctacttccgcggccttggagaaaatttaaaggcatatgtagtgaccacattaaaattcgtatgttagttggtcctgtctataataaccgggtcatatccgaatggtcctcatatttagttggtcgtgtcatattttagtatattagttagtcaggtcacagtagcgtgtttaattagtttgatcatagtagccggatagggagaaaatttaaaggcagacataatacccacatatctagtttgtcttaacatattatagtgtgttagtcgggtcacagtagcgtgtttaattggttggatcataatagccggatagggccggggctgccccttaaatgtttagggaataatatctagcattaaagttagccgtttttaattgggcaaattacatcaagaaatctaattgtgaaaactacagccacacccattttccagattttggacactgtgaaacccacgggcggaaaagtttatgcgcgcacccaattttcgtgagaaaatttctcccaaacccacaatttataaaatttggtttcttcgtatttttcttcttcttcttcttcttcttcttcttcgtcacgcgaatttcttcttcaattctttttccttttttcctcccaactgtgacttccgatcagtaatattgaatatttagacagtataatcacatgaagattagaaacaatagatgaatgaaatcgaaagttagggtttgaggtgatgttctgagatgaatcgagatcttgttgtttgttatttccgaaagatgtatgaatgattttttttttttaattaggtattatgattgagaagatggacctgagatgtgttctgagatggagatagggtttgtaattgtttcaatcaagtagaacaggaagaaaagttgatttgagatttagaaaatacagggaataataataaagcttatttgacatgggataatgaacaacgaagaagaagatgatgttgttatgactgcataacatgtcaagcagtcgagaaaatatctgcataaacttttatgcagtcgaaaaaatggatgcataacacattatccgacatctttgttattttgtgtgaaattgaaaattgatgcataatacatcatggagtcaagaagatggatgtataacctgatatgcatccaaaatacggctgcataatgcattatgcatagagaaaattgttgcataatcttgtatgcatcagaaaatggatgcataacctgatatgcacccttaaatatggttgcataatgcactatgcatcaattttttctgtacgcactaaaatcaactaaaacaatggctacataacttgttatagatgcataacttgttatgcagtcgaaaaaatggttgcataattcgttatgcgtctgcataatgtgttatgcattttttttggaggctgcataatgaatatgtaatcggttttcgaaaattttccctaaaacgatgatcaccttcgattttttcgtgaaaaacaaaaatttgatattgttgtttgtactcgttgtgtagctctcttaaaacgattttcaacgatgtaaaatttcaaggcgcggttttttaaatatgttatatccaagttggtaagcccctgatgcataacccgtcatgcggatgcataatccgtcatgcaaacatttttaataatttcatataattatggatgtcacggaactaaaaattaattgtgggcctgacaatgagaatattgttttttttggacctgcgcctaatttccccaatttaattatatttgaataattggttgcgccaagcctaagttagcattgatcgtatcatgctattatttatttttatttctttgttttcaacggaattgcagaccatatttgtttgatgagcaatttgtgagagttatcaaaacttgtcacttacgaagagttatataagccgactcttattaccactttagttgggaatccgtgaaatgacaaaaattccaattccttgccgtatccaatcttaggaagcccattaacgtaattagtttgaggacaaattaaaaaacagtcacagtatttagatgcggtttgcaaaagcatcctactacgacaaaccattaacaagatggtcctacttccgttaaaagcaaggttatgtcactgggacccactgatgcagagttaaatgcactggtaatttgacgagttttcccttaaccagaccggattaaatctagtaccgtatatctcatacggagtcatctcgatgactaaatatacggccaagattatggtcttagagtatatccttaacctaatgaatttagatctagcaccatacattttaatattgatgcatctcgagatgaaacagacggataggatcagaagttggaacactcgatctataacagtttagggttcaggaaatgaggcaaagtcatttcatttcgtctcagccatctctctgtctctaaactctctgcagaaatggcgatacactcgaaaacttgagattttcagtggtttatgtcgcaaacagatcatcactagattaggttggtagtgttaatggttttttaaacatcttcagtgcttattcgtgaagattagagagcaaagaaggtaactggtggtcaaacggcggtggttttcttacaagatttcgtcactatgtacgcgaatataatgaggttggtattcataaccataaactgtcaatttcacattagatttcagtaaccctaattggtcgattttttttcaacttttataaaccctaatttctcaaaattggatattttacaaattcagtaatttggtattttacaaatcgatttagtaaaccctaatttaggactgttgttatgttatctgctacaaatcaattcagtaatttggtattttgtctgtccatttagtgacccctaattgaggaaaattaggtatgttatctattactagtcacatacttatattttgaatttgattatgtgtattgcatgaagtatgtgaagaacccagttagaagctttagggttgaagaaaatgatacaaataagattaggtattttgataatataagtgtgaactgtggtggattgaatggtattagtgatgttgttcatgctgcatatcagttaccccctattaagaaggttagtctgacctggttcagtgacacagacccaaaaccaaaaggaacagttcctgctgctgctactcaataacttcctttctatttttaaaacacttatgttatgttatggtcttaatgtatgttaatattctatgttattttgatggtgtcataatcatgaaagtttcttattatttaaagtgtagctcattatatttgtagatctgctatttccttgcataattctgtcattttcagagatgttttttttacatttgatctagctgcattgaagacaacatcagacagccattgaaaatcaagacagatggagcatttgaggtaagcaatattatagttgtgtgcattctggcagaagaaaagcatcacagtttccttacacttcttcttcttgcagtcttggttcttccatggacagttgttgtgcatatgactcttgtcacagatcagatcttccacgtttgcaaaccacgtcagccacaggttaactctagttaactgggttttattaggatagagggcattttgggaacatttaacaccgtttttttgaaaaactgttatgtcgcccaaagtgtgactgttttgtatacgatttataaaagtatgatcaatttataaccaaattagaaaaagtatgaccattttgtaattggctcttagtttaatttccatggctgccactaactccatagccatcgatcttggccatcatgtacagtggggactcaaggtttccaccaggttttccatcgctgccactaactcctttatgtagagtatctatgcttcctaaggttggatacggtaaggaattgcagaccataataaactaattacttttatggtctccctgcactcttcctttatgcagtatctatggtgactccatcgtgcatgctctctctgaaaaaattgcaaatgcagatacatgttagttcaccaaattgcaaatgctgcatgttgttgcagttactggtggtgcacctactaccaacagacaatcattaaactttcgtactttacattaggtacaattaatactactccgggctataaatgtatagttaattgggatcgactaaaatcattgagttataccaaagataagcactattaacttaacaaatcataaacaataaccctatcgccatctccagggaagatttcatgagcccacttaatctaaagctccatccttgacgttaatttagattgctcgtaaaaaaaaaaaaaaaaaaaccctgaaattagaaaagataacactccttagttagggattatcacatagccaatgaataaaatcagcaaaccttgcaaccaatttgaatttgtacagagaaaaggaggatgagtagggcacatgtgatccaaaagaacgtagccatcagcatatgcctgctagcatatgcggttccctgtagaagttcttgtaggagtaacaatgcagttccctgagatggagaagtttctgaaaattggtagaattagagaaacacggagtaggagaaactaaatacacatagctacggcatagatataagatcacagttcgttatattaggaaagagaaggaaaaaaaaccataggtttcaatttctgaaatcattacaaaaatcaatacctatcaccaaagtctcttcttatttagcaaatttcttcaagttcaactgaaatcaacaaaaagaagatggagatgtcgcaaggaatttctcaagtatgagaagaagcggtggctcacaaagtcactgttgacgtttgagaagaagaagcatatgacatgttatatggaaacgaaaaggaagaagaggagaagaaaagattagggtatcctgcaaggtttcttatggacggatctatctctcaaaacatgatgagttttatattcatgatgaagagagtatatgattttcattacggaaacaggatgttcgtccttattacaaatcaggaaccaggggatccgaggtacgaaaatatccctcccccaactttcaatccggaccttaggataacgaaatcaatgatcagatatatcctgatagacaaaatacacttctttttataatatatatttacgaactaaaaaataattttatgttgcgtagtaaattacaagctttagtagcacaaacaatttaaatttggtgagacttttgggattctacgctgaaagtcgttacagactactggaatgcggaagaaacttctaaaatggtgttgactgctaatgggggtactgttttagtggggggtgtaccaatatgcatataggaaaaagaagtattttattttgggttgatacgcccccaagaaaaagggtaccccattagcagccttgacattagtgggtaggtatgcagttgcaccccttcaagtatgagctcccaggcccaatttaaattattttaccccacctttagccattttaagccctttgcatccctcgaatatattcacattgataactttcccacccactcttcaaaatctagctaattcgagctgatgcacgagtcaaatggtcttcaattcaataaggctgaaatttagtagagtcctctttgaaatttgactgttttgttgtaggatttctactaacagcaattgtggtgtgacacaatgcaaagatttcctttttaacggatagtactagaactagattttgggaagaccagtggttaggtgatactcctgtaaaagtttccttttccaacctatacaatgtctcaaggaagaaaaacaatgtagtcaaataattttatagcagaaacagagaaggatagtcgaaatggtacctggacttgaggaggagaccattaaatattgagatagtagaagcagagaaactaaccaacaaaatacaacacgtgacactgagtgacgtcaaagaacagaaaatatggaagtgggcaacatgcgcagcttttacgatacactcctgctactcatctctaattccttccccatccttcgttgactttactcacaagattattcgtaataataatatgcataccaaagttaattttttttacgtggttggtctatcataattcctttctagaaaagagagggagaacgttaataaacatatcttatatgcctgtcagttgaaggttttatgcgatatttagagtactattatggtattaaatttaacctcgttaaattctcgtctcttttattctagtttgtggttatttgcaatatttagagtactattatgtacctgtgctaaacgctttcacgggttttagcataaagttcactgatttcgtaataaaatatgatacataagtgcacacttcttttcccatgtgagcaaaagcaatgagaggggccgttggcccatacacattgtgcaaaatgtctgaataataatctttgaaaatgagcaatttgtgatgctaatttgttcaagcctaaaatgcactacagactcaaatataattctttaatggaaaatcaacacggtacctttttaggctttcacaatcgcagccagctgttctaatcaagaacttgatcgtattaatttatttgttgattatctttgaccactaggtaaaatcatagacatcaaactagtagctctgacccttcgttcggtgaaaagataaatgcatgactcataaaacctgtgcgcaatacatattaagtatatataggatcatccataagagagaaagaaacacaagtacttcccattctgaattttcgataagaaattaattcattaattaatttagaaaaatcatggagaaagcaaaacttatgaagctaggtaatggtatggaaataccaagtgttcaagaattggctaaactcacgcttgccgaaattccatctcgatacgtatgcgccaatgaaaaccttttgttgcctatgggtgcatctgtcataaatgatcatgaaaccattcctgtcatcgatatagaaaatttattatctccagaaccaataatcggaaagttagaattagataggcttcattttgcttgcaaagaatggggtttttttcaggtatatatgtcgtaaatacaagcattgtgattgcatccagtagttgtactttgttacactaaatattagctagtgaatcttactttacatatatatgttgcaggtagtgaaccatggagtcgacgcttcattggtggatagtgtaaaatcagaaattcaaggtttctttaacctttctatggatgagaaaactaaatatgaacaggaagatggagatgtggaaggatttggacaaggctttattgaatcagaggaccaaacacttgattgggcagatatatttatgatgttcactcttccactccatttaaggaagcctcacttattttcaaaactcccagtgcctctcaggttattattaattcataatcggtttctatgcacttgactttttaatctcacattttcgtagtcggtttctgtgcacctcactcagtttattcttattctttttttttgtttggcccacacatatttaacatttagtccaccttgttagaatttcagactataaatcattctttacaattccttattagctgtaaccatgttgtatgtgaacatatttaatattttatgctgatatataattatgtatatgcatgctctagaattatatattctaccacttgtaggaagatacttccaattttatcttctcttattctttaatgatggaaaattcctttttaaacaagagctagaacggagtacacctcacctcatgctaggaaagacatatgtcattcaaccttccatcaagaattgaaaacaacctcacataggattatcataactagtatgtcattccaaatagtgtaagagatatttgtccttatgtacccttaaacatacataattaacacaaacaaaccttaattcattgattaggattagtactaatcaagtttaaaggaatacaaattctgttttactgctgaaccaacataaaaaactgacacacctaagtctccctatttctataacaaaaattatccctcttgatattattttctggttcccccattgaccaataaacatgcaaaattaacactctttaaaagagtacgtatgatagatcataatatttttctctctttgaattttctcagtgatgtgattggatacattaatttggttggtttattatagtttttcatatgattatctaatttacgtacagggagacaatcgaatcctactcatcagaaatgaaaaagttatccatggttctctttaataagatggaaaaagctctacaagtacaagcagccgagattaagggtatgtcagaggtgtttatagatgggacacaagcaatgaggatgaactattatcccccttgtcctcaaccaaatctcgccatcggtcttacgtcgcactcggattttggcggtttgacaatcctccttcaaatcaacgaagtggaaggattacagataaaaagagaggggacatggattgcagtcaaacctctacctaatgcgttcgtagtgaatgttggagatattttggaggtactggtccttgtttcgaatactggttttgcctgtacccagaaaatttcttattgttttttcttttacagataatgactaatggaatttaccatagtgtcgatcaccgggcagtagtaaactcaacaaatgagaggctctcaatcgcaacatttcatgaccctagtctagagtcggtaataggcccaatatcaagcttgattactccagagacacctgctttgtttaaaagtggatctacatatggggatcttgtggaggaatgtaaaacaaggaagctcgatggaaaatcatttcttgactccatgaggatttgaaaactcaagaaaaaataatacgacgtgattgcatgtcagattcaactatccttttgttgttttttggtgctcgagtccttaattgttttgatcattgcttttgattctaattaataagacttttctcaagaaccacatgtaatgtacctttactttcagaaaataaaaagtattgaggcacaaatgagaaaattgagagagtgcttgagaagtgtaatttctcgaaagtgcgttgtgtttgtgttttgttagttcttcaagtgtgtactgatcttagttttgttcgtgctctcctattgttactaattttttccacgaggttctttcttttctctcgtgatttaatcgtatatggtgcaccaaccagttaactatactttggagcacttataaaaccaacccgaaacacacagacacaacccgaaaccacacattaaatgtctcaccttgagtaagatagattgagcactgggagaactcgtacagaattggttaggtacacctgaatatcttagaacgagaaacttataatggcaaagttgagaaggtttactcgcttaaaccggtcggtattctacttttaagagatgcagagaagtatggtatagatgatactaggcatgactcaaaaatatttcatggttgcatcgcaggatatcaaagaagttttaggaaatggaagtgcgaatgcatttgagaaaggaatgggaataaatatgtggaagtatttaaaaagttaaaaagcttttggattctcttgtttatgttggtgaaggaaatggaacaacaatcatggaaatctacaaagattttccgcatataaaatgtacactttatgatcttcatcatgttacttctaacactcacgataacatcgaaaaagttctcggtgatatatgttcaagtctgttcccagcgctcaagctatcttactgaaggtgagacatttaacctaatacttttctaacgatgaccctcttttttttaatttttattttatagatgacccttcatcttgcatgactggaacgatgaacattgtgtcaagattctaaagaagtgcaaggaagcaatgccaaaagagacgtgtaaagtaatcatagtggatgtagtacttctagaagaatctaaaggtgaactcagaaaggaaagattgattctagatcagtgttttaagaaccgggccggccggttggaccagcaaacgggtgaaccaataagaaaaacgatctggttcaacattgacccactaacatgtcaaaaaacccagtaaaaccagtaaaccggacggttgaaccagtaaccagtgagacctagtccgttctaaaactgggttgatccaacaaaaaaaaaaaaattgtacatgacattctaaagaatcgaaacattgtatcattccattaaaatcactcaaacatggatacttcataaacattggccctgtctaaaaaccccatttatttaaattttttatttatcttctggatcttctcaaaaactttgagaatctttcaagagttttaaaagcatcggtatcacttcatcagaaaacagtacttcagcacaagattacattttattatggaatagtaattttgatgatgaattttggatgtaacttagacttttctacataaacaacaaagaagaaacgctcaattaaacggagaagagataaaatcacaaagatgtgcaattggtgatagcttaaaagtaaccaaagaaaattggtcaaagagtgtgaaagaggaacagaaagagacaacgaaggaggaagagagacgtaaggagaagggatggggactaaaatgagatttggtattaaagtgttgcttctgagaattgttttgtccacacatgacacaactaccctttgacacgtcctagtattttttttgcctactaacccaacttgatgtttcacattcgacgtgtgtacaataaactgacaaccatcaaatatagttctagacattcaaatatagaatgtagattattaacttctgactgagtgaaccccggttgaaccactgattgacccagttgaaccactgattgacccagttaaccctgacccagtgattttactgagtcaatgtccggtcctgttttgggaacattgttctagatatggatatgatggtgaatactggtggtagggggagaatggcaaatgattgggaagttttgttcagaagtgcagggtttcggtctcataaaatcaaacccattcgcgttattcagtctgccattgaaaccttcccatagtaaaattaattaatctcaaaagagtactactttgattatttcactaggaagtgtgtatatataatgcgattcacgtgtcaacaataattcagcttcacttgaggagatggttccggtgtattttttttttttgaatcgtatatcaataaactgaattccttaatatttcaggtactattatctcatgtataaaaataaaataaaatttgtggtatagtgataaaattgttaggtggtgatacaaagtgtctgagttcaacactggctagtatctgatcagtatggggactaaaataaataaaaaagacactgattagaaaagtaagaggggactaaaataaataaaaaacacactgattaaaaaagtaagaaaaaacattggcagcgtgatgcggagaggggtcaccaaccaaatggagagtttttataaagggatcatgcataatgcataaagggatcatgcataatgcataaaggggatagaactagatttcgggaagaccagcggttaggtgaatgaactgcaggagatgacataaaggatgctttcaaagacagatattgaaaaaaaatttactataagtggaaattttattaatttaaaacatcctaccttatgccatttgttgcaacatctagagagaatgtaatcaaccgatgttcgtcgcagaggtaaaagacaagtacgctccaaagatcatattagatattgaggagaatattttggaccgatctcattcctccaaggctctcgacaacattagatttgaaatgttagtcttaaaatgggaagaactatttcataagtaattgtatggttgtctttctgtaactttaactttcacctcggtccattatgggataaggtatcgcaactctgtgattatttatccatataaatttgtatcgttttatgtcatataactggcttataaaaggagtactactttgcttctttctctaggaagcgtatatataatgcggttcaataagtcatataactgcttgtatcaacaataagtcatcttcacttgaggatatggttcctattttcccgtgttttatttttctaaactatatatcaataaattgaattccctaataattcaggtatgaatatcatgtatcaaaaaaaatatcatagtagagtggtaaagttgttaagtgatgatactcgcaatctgagttcaacactcgctagaatcggaataatgtggggactaaaataaataaaaaaacacactgattaaaaaaaattaaaaaaaatggcagcgggatgtgcaaccgaacggaaatcttctacgaagggatcatgaataaagtaaataaatatataaaactagattttgggaagaccagtggttaggtgatactcctgtgaaaacttcctttcccaacctcattttgaccaaaacatgggtttgatctaacatttgtccaggctttgcgtttggtctaaagacctacattgacccgtgttgaccgtgtcatatcttgacttctgtaatataattattaagagtttaaaataaaatttaattattaatccaatttactattttatccttctctttattaatattgaccgaaagttgtatgaaaagtagaaaaacgtttcagctattccgttcagggcctagctctgctactgccatttttcaatcaatgccaagagctgctaatacaatcacgattcaccaaagttggttgatcaatcgattgtgctcactgtctcaagacttcggattatccccattcagccaacacataatccatcaacaaacccctgcaatcatcaccccattcgatatgttgctgtgtttctttttcaatcgagagcttttaatttcagatcacatacagacacccaaatactgcatacgattagttcttccttgtacataacacccgatccaaaatcccatggaagacttcaagtacagccaacccaatcttccccaaccatcaactaagaattactgataatcttcttcattcatctttaatttcatcaacggtacaatcacattttctccctaaatatcattggcagaaaatcttttccattccttgttttctctaccatctatacttctctgtcttgatctttccatgactggcacccatctgttaaattctcaactatgtagtttcaattcccaccaagccaaaataaaacgggggaaccctaaagtaatgtgaacgacatctaaaaccctagatttcaattttggagttaataccctcctaaaatagatcactgaaaccctagatttcaattctcgagttaataccctaacatccggagaagaaattataatttctatcattatttgttccctccctgaaacgagatggtggcaccataagtgttcagataaacaatgagaaatcgagagattaagggaaataattagggttcgagacagcggccaagctagaaactcaactaaggggaagcaaaattccattaggggaagcaagaaagcaaaattaggcttgtgaaaatatttgggcttgaaaattaggcttggaagaccaaagggatggggtcgcaactgcgcacccttattacactctgcatcctccaatggcttgagattagtaagaaatgggtttttcagacattaattctttgttgtatttgtgtccgcaactgaagtgaaagaaggagatgcatttagagggacttgaggtgatattggtgttaaaaacaaggaattgaagttaggttttctttgaattaggttttaggttgtttcgaatcaagaaatcagggaaagatatgattgagttagggttttaattgagagttggaggaggatttgaaggaagtacgatgattttatgggtttagagagatgggttctcaagtgcagcaaagatgaagaacaactcgtcgttgtggtgggtgaaatacaatgttaggttagagtacataaggaatgatctcatgtttctcatctttgtaattactttgtttagttaaggttacaacagtaactttatttagttattagattttatttaatattttttataattactacacagaagtcaagatataacacggtcaacacgggtcaacgttggtctttagaccaaacgcaaaggctagataaatgttagaccaaacccaggtttgggtcaaaatgtaagtaccaaaaaccaaataacccattaaaaaaaaaaattaaaaaagcagcgggatgtgtagtggggtcaccaaccgaacggagagcttctacgaatggatcatgcataaagtagacatatatatatatataactagattttgggaagaccagtggttaggtgatactcctttgaaaattgcctttcccaacctatacaatgtctcaaggaagaaaaacaatgtagtcaagcaattttatagcagagatagggaagggtagtcgaattggaacctagacttgaataggagaccattaaatattgagataatagaagcacggtaactatcgaacaaaatgcaacacgtgacactgagtgacgtcaaagaatagaatatatgtaagtgggaaatatgcgtggactttacaataagctcctgctattcatctataattccttccccatccctcgttgactttcctcaccagattgttcgtaataataatgtgcataccaaagttaaagtttttacgtggttagtctatcataattccttgctaactcaggataatccagaatagagagtgagaatgttagtaaatatatcttgtatgagaaaaaacaaaatcgactgccagttgaaggttttataggatatttagagtactattatggtatcaaatttaaactcgtcaaattctcatctcttttattctagcttgtggttatttgaaatatttagagtactattatgtagctgtgctaaacgcttccgcggattttagcgcaacagttcactgatttcgtaaaaaaatatgatacataagtacacacttcttttcccatgtgagcaaaagcaatgagagggtccattggcccatacacattgtgcaaaatgtctgaataataatctttgaaaatgaacaatttgttcaagcctaaaatgcattatagactcaaatataattctttaatggcaaatcaacacggtacctttttaggctttcacaatcgcagccagctgttctaatcaagaacttgatcgtattaatttagttgttgattatctttgaccactaggtaaaatcatagacatcaaactagtagctctgacccttcgttcggtgaaaagataaatgcatgactcataaaacctgtgcgcaatacatattaagtatatataggatcatccataagagagaaagaaacacaagtacttcccattaaattcgataagaaattgattcattaattaatttagaaaaatcatggagaaagcaaaacttatgaagctaggtaatggtatggaaataccaagtgttcaagaattggctaaactcacgcttgccgaaattccatctcgatacgtatgcaccgatgaaaaccttttgttgcctatgggtgcttctgtcataaatgatcatgaaaccattcctgtcatcgatatagaaaatttattatctccagaacccataatcggaaagttagaattggataggcttcattctgcttgcaaagaatggggtttttttcaggtatatatgtcgtaaatacaagcattgtgattgcatccagtagttgtactttgttacactaaatattatctagtgaatcttcctttacatatatatgttgcaggtagtgaaccatggagtcgacgcttcattggtggatagtgtaaaatcagaaattcaaggtttctttaacctttctatggatgagaaaactaaatatgaacaggaagatggagatgtggaaggatttggacaaggctttattgcatcagaggaccaaacacttgattgggcagatatatttatgatgttcactcttccactccatttaaggaagcctcacttattttcaaaactcccagtgcctctcaggttattattcattcataatcgatttctatgcacttgactttttaatctcacattttcatagtcggtttatgtgcacctcactcagtttattcttattctttttttttgtttggcccacacatatttaacatttagtccaccttgttagaatttcagactataaatcattctttacaattccttattagctgtaaccatgttgtatgtgaacatatttaatattttatgcttatatataattctgtatatgcatgctctagaattatatattctaccacttgtaggaagatacttccaattttatcttctcttattcattaatgatggaaaattcctttttaaacaagagctagaacggagtacaccttatctcatgctaggaaagacatatatcattcaaccttccatcaagagttgaaaacaacctcacataggattatcataaatagtatgtcattccaaatagtgtaagagatatttgtccttatgtacccttaaacatacataattaacataaacaaaccttaattcattgattaggattaatactaatcaagtttaaagtaatataaattatgttttactaccgaaccaacataaaaaactgacacacctaagtctccctatttctataaaaaaattatcccttttgatattattttctggttcccccattgaccaataaacatgcaaaactaacactctgtaaaagagtatgcatgatagatcataatatttttctctctttgaattttctcagtgatgtgattggatacattaatttggttggtttattatagtttttcatatgattatctaatttacgtacagggagacaatcgaatcctactcatcagaaatgaaaaacttatccatggttctctttaataagatggaaaaagctctacaagtacaagcagccgagattaagggtatgtcagaggtgtttaaagatgggacacaagcaatgaggatgaactattatcccccttgtcctcaaccaaatctcgccatcggtcttacgtcgcactcggattttggcggtttgacaatcctccttcaaatcaacgaagtggaaggattacagataaaaagagaggggacatggatttcagtcaaacctctacctaatgcgttcgtagtgaacgttggagatattttggaggtatttatttaagcttgggtaactactggtccttgtttcgaatacctgtttttcctgtacccagaaaatttcttattgttttttcttttatagataatgactaatggaatttaccatagcgtcgatcaccgggcagtagtaaactcaacaaatgagaggctctcaatcgcaacatttcatgaccctagtctagagtcggtaataggcccaatatcaagcttgattactccagagacacctgctttgtttaaaagtggatctacatatggggatcttgtggaggaatgtaaaacaaggaagctcgatggaaaatcatttcttgactccatgaggatgtgaaaactcaagaacacaataatacgacgtgattgcatgtcagattcaactatccttttgtcgtttttttgtgctagagtccttaattgttttcatcattgcttttgattctaattaataagacttttctcaagaactcacatgtaatgtacctttactttcagaaaataaaacgtattgaggcacaaatgaaaaaattgacagagtgcttgagaagtgtaatttctcgaaagtgcgttgtgtttgtgttttgttatttcttcaagtgtctactgatcttagttttgttcgtgctctcctattgttactaattttttccacgaggttctttcttttctctcgtgatttaatcgtatatggtgcaccaaccagttagctatactttggagcacttataaaaccaacccgaaacacacagacaaaacccgaaaccacacatccttgagtaagatagcttgagcactgggagaactcgcacagaattggttaggtacacctgaatatcttagaacgagaaacttataatggcaaagttgagaaggtttactcgcttaaaccggtcggtattctacttttaagagatgcagagaagtatggtatcgatgatactaggcatgactcaaaaatatttcatgattgcatcgcaggatatcaaagaagttttaggaaatggaagtgcgaatgcattttagaaaggaatgggaatggatatgtggaagtatttaaaaagctacaaagcttttggattctcttgttgatgttggtgaaggaaatggaacaacaatcatggaaatctacaaagattttccgcatataaaatgtacactttatgatcttcatcatgttacttctaacactcacggtcaccctaacatcgaaaagttctcggtgatatatgttcaagtctgttcccagcgctctagctatcttacttaaggtgagacatttaacctaatatttttctaaagatgaccctctttttttttctttttttttaaagatgacccttcatcttgcatgactggaacgatgaacactgtgtcaagattctaaagaagtgcaaggaagcaatgcccaaagagacgagtaaagtaatcatagtggatgtagtacttctagaagaatctaaaggtgaactcagaaaggaaagattgattttagatcagtgttttaagaaccgggccggccggttggaccagcaaaccggtgaaccaataagaaaaacgatctggttcaacattgacccactaacatgtcaaaaaacccagtaaaaccagtaaaccggacggttgaaccagtaaccagtgagacccagtccgttctaaaactgggttgatccaacaaaaaaaaaaaattgtacatgacattctaaagaatcgaaacattgtatcattccattaaaatcactcaaacatggacacttcataaacattggccctgtctaaaaaccccatttatttaaattttttatttatcttctggatcttctcaaaaactttgagaatctttcaagagttttaaaagcatcggtatcacttcatcggaaaacagtacttcagcacaagattacattttattatggaatagtaattttgatgatgaattttggatgtatttagacttttctacataaacaacaaagaagaaaagctcaattaaacggagaagagataaaatcacaaagatgtgcagttggtgatagtttaaaagtaactaaagaaaattggtcaaagagtgtgaaagaggaagagaaagtgacagtgacagtgacagtgaaggaggaagagagacgtaaggagaagggatcgggactaaaatgagattaggtattaaagtgttgcttctgagaattgttttttccacacatgacacaactaccctttgatacgtcctagcattttttttgcctactaacccaacttgatgtttcacattcacgtgtgtacaataaactgaaaaccatcaaatatagttatagatattcaaatctagaatgtagattattaacttctgatccagtgaaccccggttaaaccactgattgacccagttaacccttacccagtgattttatttggtcaacgtccggtcctgttttcagaacactgttctagatacggatgtgatggtgaatactggtggtagggggagaattgcaaatgattgggaagttttgttcagaagtgcagggtttcggtctcataaaatcagacccattcgcgttattcagtcttccattgaaaccttcccatagtaaaattaattaatctcaaaagagtactactttgcttatttcactaggaagtgtgtatatataatgcgattcacgtgtcaataataagtcagcttcacttgaggagatggttccggtgtttttttttctgaatcgtatatcattaaactgaattccttaatagttcaggtaccattatatcatgtataaaaataaaataaaatttttggtatagtgataaaattgttaggtggtgatacaaagtgtctgagtacaacactggctagtatatgatcagtatggggactaaaataaataaaaaacacactgattaaaaaagtaagaggggattaaaataactaaaaaaaacacagtgattaaaaaagtaagaaaaaacattggcagcgtgatgcggagaggggtcaccaaccagatggagagtttttataaagggatcatgcataatgcataaagcggatagaactagatttcgggaagaccagcggttaggtgaatgaactgcaggagatgacataaaggatgcattcaaagacaggtattgaaaaaaatttactataagtggaaattttattaatttaaaacatcctaccttatgccatttgttgcaacatctagagagaatgtaatcaaccgatgttcgtcgcagaggtaaaagacaagtatgctccaaagatcatattagatattgaggagaatattttggaccgatctcattcctccaaggctctcgacaacattagatttgaaatgttagtcttaaaatgggaagaactatttcataggtaattgtatggttgtctttctgtaactttaactttcacctcggtccattatgggataaggtatcgcaactctgtgattatttatccatataaatttgtatcgttttatgtcatataactggcttataaaaggagtactactttgcttctttctctaggaagtgtatatataatgcggttcaataagtcatataactgcttgtatcaacaataagtcatcttcacttgaggatatggttcctattttcccgtgttttgtttttctaaactgtatatcaataaattgaattccctaataattcaggtatgaatatcatgtatcaaaaaaattatcatagtagagtggtaaagttgttaagtgatgatactagcaatctgagttcaacactcgctagaatcggaataatgtggggactaaaataaataaaaaaacacactgattaaaaaaattaaaaaaatggcagcgggatgtgtagtggggtcaccaaccgaacggaaagcttctacgaagggatcatgaataaagtaaataaatatataaaactagattttgggaagactagtggttaggtgatactcctgtgaaaacttcctttctcaacctcattttgaccaaaacatgggtttgatctaacatttttccagactttgcgtttgtctaaagaccaacgttgacccgtgttgaccgtgtcatatcttgacttctgtaatataatttttaagaatttcaaataaaatttaattattaatccaatttactattttatccttccctttattaatattgaccgaaagttgtatgaaaagtagaaaaacgtttcaaatattccgttcagggcttagctctgctactgccatttctcaatcaatgccaagagatgctaatacaatcacgattcaccaaagttggttgatcaatcgattgtgctcactgtctcaagacttcggattatccccattcagccaacacataatccatcaacaaacccctgcaatcatcaccccattcgatatgttgttgtgtttctttttcaatcgagagcttttaatttcagatcacatacagacacccaaatactgcatacgattagttcttccttgtacataacacccgatccaaaatcccatggaagactacaagtacagccaaccaaatattccccaaccatcaactaagaattactgataatcttcttcattcatctttaatttcatcaacggtacaatcacattttctccctaaatatcattggaagaaaatcttttccattccttgttttctctaccatatatacttctcttcttgatctttccatgactgacacccatctgttaaattctcaactatgtagtttcaattcccaccaagccaaaataaaacgggcgaaccctaaagtaatgtgaatggcatctgaaaccctagatttcaattttggagttaataccctcctaaaatagatcactgaaaccctagatttcaattctggagttaataccctaacatccggagaagaaattataatttctatcattatttgttccctccctgaaacgagatggcgacactataagtgttcagataaagaatgagaaatcgagagattaagggaaataattagggttcgagacagcggagaagctataaactcaactaaggggaagcaaaattccattaggggaagcaagaaaccaaaattaggcttgtgaaataatttgggcttgaaaattaggcttcgaagaccaaagggaaggggtcgcaactgcgcacccttattacactctgcatcctccaatggcttgagattagtaagaaatgggtttttcagacagtaattctttgttgtatttgtgtccgcaactgaagtgaaagaatgagatgcatttagagggacttgaggtgatattggtgttaaaaacaaggaattgaagttgggttttctttgaattaggttttaggttgtttcgaatcaagaaatcaggtaaagatatgattgagttagggttttaattgagagttggaggaggatttgaaggaagtacgatgatttttatgggtttagagagatgggttctcaagtgcagcaaagatgaagaacaactcgtcgttgtggtgggtgaaatacaatgttaggttagagtacataagaaacgatctcatgtttctcatctttgtaattactttgtttagttaaggttacaatggtaactttatttagttattagattttatttaatattttttataattactacacagaagtcaagatataacacggtcaacacgggtcaacgttggtctttagaccaaatgcaaaggctagacaaatgttagaccaaacccaggtttgggtcaaaatgtatgtaccaaaaaccaaataacccattaaaaaaaattaaaaaggcagcgggatgtgtagtggggtcaccaaccgaacggagagcttctacgaagggatcaggcataaagtagacatatatatataactagatttttggaagaccagtggttaggtgatactcctttgaaaatttcctttcccaacctatacaatgtctcaaggaagaaaaacaatgtagtcaagcaattttatagcagcgatagggaagggtagtcgaattggaacctagacttgaataggagaccattagatattgagatagcagaagcacggtaactatcgaacaaaatgcaacacgtgacactgagtgacgtcaaagaacagaatatatgtaagagggaaacatgcgtggactttacgataagctcctgctactcatctataattccttccccatccctcgttgactttcctcacaagattgtttgtaataataatgtgcataccaaagttaaattttttacgtggttagtctatcaaaattccttgctaactcaggataatccagaatatagagtgagaatgttagtaaacatatcttgtatgaggaaaaacaaaatcgcctgccagttgaaggttttataggatatttagagtactattatggtatcaaatttaacctcgtcaaattctcatctcttttattctagcttgtagttatttgaaatatttagagtactattatgtagctgtactaaacgcttccgcggattttagcgcaacagttcactgatttcgtaacaaactatgatacataagtacacacttcttttcccatatgagcaaagcaatgagaggggtcattggcccatacacattgtgcaaaatgtctgaataataatctttgaaaatgaacaatttgtgatgctaatttgttcaagactaaaatgcactacagactcaaatataattctttaatggcaaattaacacggtacttttttaggctttcacaatcgcagccagctgttctaatcaagaacttgatcgtattaatttagttgttgattatctttgaccaataggtaaaatcatagacatcaaactagtagctctgacccttcgttcggtgaaaagataaatgcatgactcataaaacctgtacgcaatacatattaagtatccataagagaaaaagaaacacaagtacttcccattcttaattttcgataagaaattgattcattaattaatttagaaaaatcatggagaaagcaaaacttatgaagctaggtaatggtatggaaataccaagtgttcaagaattggctaaactcacgcttgccgaaattccatctcgatacatatgcatcgatgaaaaccttttgttgcctatgggtgcatctgtcgtaaatgatcatgaaaccattcctatcatagatatagaaaatttattatctccagaacccgtaatcggaaagttagaattggataggcttcattctgcttgcaaagaatggggtttttttcaggtatatatgtcataaatacaagcattgtgattgcatccagtagttgtactttgttacactaaatatttgctagtgaatcttcctttacatatatatgttgcaggtagtgaaccatggagtcgacgcttcattggtggatagtgtaaaatcagaaattcaaggtttctttaacctttctattgatgagaaaactaaatatgaacaggaagatggagatgtggaaggatttggacaaggctttattgcatcagaggaccaaacacttgattgggcagatatatttatgatgttcactcttccactccatttaaggaagcctcacttattttcaaaactcccagtgcctctcaggttattattaattcataatcggtttctatgcacttgactttttaatctcacattttcctagtcggtttctgtgcacctcactcagtttattcttattcttttttttttgtttggcccacacatatttaacatttattccaccttgttagaatttcagactataaatcattctttacaattccttattagctgtaaccatgttgtatgtgaacatatttaatattttatgctgatatataattctgtatatgcatgctctagaattatatattctaccacttgtaggaagatacttacaattttatcttctcttattctttaatgatggaaaattcctttttaaacaagagctagaacggagtacaccttacctcatgctaggaaagacatatgtcattcaaccttccatcaagagttgaaaacaacctcacataggattatcataactagtatgtcattccaaatagtgtaagagatatttgtccttatgtacccttaaacatacataattaacataaaacaaaccttaattcattgattaggattagtaataatcaagtttaaaggaatataaattatgttttactactgaaccaacataaaaaactgacacacctaagtctccctatttctataaaaaaattatcccttttgatattattttctggttcccccattgaccaataaacatgcaaaactaacactctttaaaagattatgcatgatagatcatgatatttttctctctttgaattttctcagtgatgtgattggatacattaatttggttggtttattacagtttttcatatgattatctaatttacgtacagggagacaatcgaatcctactcatcataaatgaaaaagttatccatggttctctttaataagatggaaaaagctctacaagtacaagcagccgagattaagggtatgtcagaggtatttaaagatgggacacaagcaatgaggatgaactattatcccccttgtcctcaaccaaatctcgacatcggtcttacgtcgcactcggattttggcggtttgacaatcctccttcaaatcaacgaagtggaaggattacagataaaaagagatgggacatggatttcagtcaaacctctacctaatgcgttcgtagtgaatgttggagatatttatttaagctagggtaactactggtccttgtttcgaatacctgtttttcctgtacccagaaaatttcttattgttttttcttttacagataatgactaatggaatttaccatagcgtcgatcaccgggcagtagtaaactcaacaaatgagaggctctcaatcgcaacatttcatgaccctagtctagagtcggtaataggcccaatatcaagcttgattactccatagacacctgctttgtttaaaagtggatatacatatggggatcttgtggaggaatgtaaaacaaggaagctcgatggaaaatcatttctagactccatgaggatgtgaaaactcaagaaaacaataatacgacgtgattgcatgtcagattcaactatccttttgtcgttttttggtgctcgagtccttaattgttttcctcattgcttttgattttaattaataagacttttctcaagctcacatgtaatgtacctttactttcagaaaataaaacgtattgaggcacaaatgagaaaattgacagagtgcttgagaagtgtaatttctcgaaagtgcgttgtgtttgtgttttgttagttcttcaagtgtgtactgatattagttttgttcgtgctctcctattgttactaatttcttccacgaggttctttcttttctctcgtgatttaatcgtatatggtgcaccaaccagttagctatactttggagcacttataaaaccaacctgaaacacacagacacaacccgaaaccacacattaaatgtctcaccttgagtaagatagcttgagcactgggagaactcgtacagaattggtgaggtacacctgaatatcttagaacgagaaacttataatcaaagttgagaaggtttactcgcttaaaccggttggtattctacttttaagagatgcagagaagtatggtatcgatgatactaggcatgactcaaaaatatttcatggttgcatcgcaggatatcaaagaagttttaggaaatggaagtgcgaatgcatttgagaaaggaatgggaatggatatgtggaagtatttaaaaagttaaaaagcttttggattctcttgttgatgttggtgaaggaaatggaacaacaatcatggaaatctacaaagattttccgcatataaaatgtacactttatgatcttcatcatgttacttctaacactcacgatcaccctaacatcgaaaaagttctcggtgatatatgttcaagtctgttcccagcgctcaagctatcttactgaaggtgagacatttaacctaatacttttctaaagatgaccctctttttttttttttttttaaagatgacccttcatcttgcatgactggaacgatgaacactctgtcaagattctaaagaagtgcaaggaagcaatgcccaaagagacgagtaaagtaatcatagtggatgtagtacttctagaagaatctaaaggtgaactcagaaaggaaagattgattctagatcagtgttttaagaactgggacggccggttggaccagcaaaccggtgaaccaataagaaaaacgatctggttcaacattgacccactaacatgtcaaaaaacccagtaaaaccagtaaaccggatggttgaaacagtaaccagtgagacccagtccggtctaaaactgggttgatccaaaaaaaaaaaaaaaatttacatggcattctaaagaatcgaaacattgtatcattccattaaaagcactcaaacatggacactttataaacattggccctgtctaaaaaccccatctatttaaattttttattaatcttctggatcttctcaaaaactttgagaatctttcaagagttttaaaagcatcggtgtcacttcatcagaaaacaatacttcagcacaagattacattttattatggaatagtaattttgatgatgaattttggatgtaatttagacttttctacataaacaacaaagaagaaacgctcaattaaacggagaagagataaaatcacaaagatgtgcagttggtgatagcttaaaagtaaccaaagaaaattggtcaaagagtgtgaaagaggaacagaaagagacagtaaaggaggaagagagacgtaaggagaagggatggggactaaaatgagattaggtattaaagtgttgcttctgagaattgttttgtccacacatgacacaactaccctttgacacgtcctagtattttttttgcctactaacccaacttgatgtttcacatctagaatgtagattattaacttctgacccagtgaacccctgttgaaccacttattgacccagttaaccctgacctggtaattttactgggtcaacgttcggtcctgttttgggaacactgttctagatatggatatgatggtgaatactggtggtagggggagaattgtaaatgattgggaagttttgttcagaagtgcagggtttcggtctcataaaatcagacccattcgcgttattcagtctgtcattgaaaccttcccataataaaattaattaatctcaaaagagtactactttgcttatttcactaggaagtgtgtatatataatgtgattcacgtgtcaacaataagtcaccttcacttgaggagatggttccggtgtttttttttctgaatcgtatatcaataaactgaattccttaatatttcaggtaccattatatcatgtataaaaataaaataaaatttgtggtatagtgataaaattgttaggtggtgatacaaagtgtttgagttcaacactggctagtatctgatcagtatgtggactaaaataaataaaaaagacactgattaaaaaagtaagaagggactaaattaaataaaaaacacactgattaagaaagtaaaaaaaaaaaacattggcagcgtgatgcggagagaggtcaccaaccaaatggagagtttttaaaaagggatcatgcataatgcataaaggggatagaactagatttcgggaagaccagcggttaggtgaatgaactgcaggagatgacataaaggatgctttcaaagacaggtattgaaaaaattttactataagtggaaattttattaatttaaaacatcctaccttatgccatttgttgcaacatctagagagaatgtaatcaaccgatgttcgtcgcagaggtaaaagacaagtacgctccaaagatcatattagatattgaggagaatattttggaccgatctcattcctccaaggctctcgacaacattagatttgaaatgttagtcttaaaatgggaagaactatttcataggtaattgtatggctgtctttctgtaactctaactttcacctcggtccattatgggataaggtatcgcaactctgtaattatttatccatataaatttgtatcgttttatgtcatataactggcttataaaaggagtactactttgcttctttctctaggaagcgtatatataatgcggttcaataagtcatataactgcttgtatcaacaataagtcatcttcacttgaggatatggttcctattttcccgtgttttgtttttctaaactatatatcaataaattgaattccctaataattcaggtatgaatatcatgtatcaaaagaaatatcatagtagagtggtaaagttgttaagtgatgatactagcaatctgagttcaacactcgctagaaccggaataatgtggggacttaaataaataaataaacacactgattaaaaaaattaaaaaaaaatggcagcgggatgtgtagtggggtcaccaaccgaacggaaagcttctacgaagggatcatgcataaagtagataaatatatagaactagattttgggaagaccagtggttaggtgatactcctgtgaaaactgcctttcccaatctcattttgaccaaaacatgggtttggtctaacatttgtccaggctttgcgtttggtctaaagaccaacgttgacccgtgttgaccgtgttatatcttgacttctgtaatataattattaagaatttaaaataaaatttaattattaatccaatttactattttatccttccctttattaatattgaccgaaagttgaatgaaacgtagaaaaacgtttcaactattccgttcagggcctagctttgctactgccatttctcaatcaaggccaagagatgctaatacaatcacgattcaccaaagttgattgatcaatcgattgtgctcactgtctcaagacttcggattatccccattcatccaacacataatccatcaacaaacccctgcaatcatcaccccattcgatatgttgttgtgtttgtttttcaatcgagagcttttaatttcatatcacatacagacacccaaatactgcctccgattagttcttacttgtacataacacccgatccaaaatcccatggaagacttcaagtacagccaacccaatcttccccaaccatcaactaagaattactgataatcttcttcattcatctttaatttcatcaacagtacaatcacattttctccctaaatatcattggcagcaaatcttttccattccttgttttctctaccatctatacttctctgtcttgatctttccatgactggcacccatctgttaaattcacaactatgtagtttcaattcccaccaagccaaaataaaacgggcgaaccctaaagaaatgtgaacggcatctgaaaccctagatttcaattttggagttaataccctcctaaaatagatcactgaaaccctagatttcaattctggagttaatacatccagagaataaattataatttctatcattatttgttccctccctgaaaccgagatggcggcacaattagtgttcagataaagaatgagaaatcgagagattaaaagggaaataattagggttcgagacagcggtgaagctagaaactcaattaaggggaagcaaaattccattaggggtagcagaaagcaaaattaggcttgtgaaaagatttgggcttgagagatgggttctcaagtgcagcaaagatgaagaacaactcgtcgttgtggtgggtgaaaatttaagtaccaaaaaccaaataacccattaaaaaaatttaaaaaaaaaatggcagcgggatgtgtagtggggtcaccaaccgaatggaaagcttctacgaagggatcatgcataaagtagacatatatataactagattttgggaagaccagtggttaggtgatactcctttgaaaattgcctttcccaacctatacaatgtctcaaggaagaaaaacaatgtagtcaagcaattttatagcagagatagggaagggtaatcgaattggaacctggacttgaataggagaccattagatattgagatagtagaagcacggtaactatcgaacaaaatgcaacacgtgacactaagtggcgtcaaagaacagaatatatgtaagtgggaaacatgcggggacttcacgataagctcctgctactcatctataatttcttccccatccctcgctgacttttctcacaagattgttcgtaataataatgtgcataccaaagttaaattttttacgtggttagtctagcataattccttgctaactcaggataatccagaatagagagtgagaatgttagtaaacatatcttgtatgaggaaaaacaaaatcgcctgccagttgaaggttttataggatatttagagtattattatggtatcaaatttaacctcgtcaaattctatctcttttattctagcctgtggttatttgaaatatttagagtactattattctatctcttttattctaggacttagtgatgcttcttccacattttaatttgttccaatctgaattatattttgtcaaatacgtaaaactgctttataaaggatggtcgtgtctagctactatggaaatcagtcctgtttggggtgattcttttgaacatgatcagttgttttcttgaaaaatccaaattataataattctcttaagggacttgactatcattatgttttctcccgtgtagcgaagagaggccctgttatgaatattcgccccgagcctaaacaatgttagagacggccctgctttttatcccaatgtagagagggtgatcttttacggttggatctcttctcggtgcacacaacgttgtgtgtagcaaaaccgaaaaaaaacaaaattatttgtggcaattctaagctagttggtttttggaccactattagattactaactaatgacctaatttttcattagtagctaatctcactactaatccagcggtcaagattaaaccagctcttcctataaaatatattttttctgcaacttcacagaaaaaataaggaaagaaagagaggacgaaagagacagagagagattgaaagaagaaaccttaaaaacttgtccttccagaggctaaggagaatagaacgtgttttggtcatctaaagtttcaacattcaatctctctctaaccattcatgtcggtttctcatctttttcttcgatacccttttgtttaattcaattcaaacgtcttcttcattaaatctgtgaaattaatgggaaaagcttattcaatgaaggtttataattgatttttacaatctgggttgtaattagaattctgaatcagtgaatgtataagattgtaattgaagattattatgatctagtcattgagaatctttcttctaattggtttccgagtgatttaatgttattaattgaaactaagaaaggttcttacttttgtctcccaagagatcgatgggataaagaatttgctaaattacagactgggtgaattcaaattctgattgatttttcggatttgagtttggattgagttttttgttttttgagtcagtaattttgtttgaaagatgggttcttctcaaggatctactactttgagtgtcaaggaattgaaaagagaagtttatttcattgattctttacctgtttatgttaaagaattgattgctggtggatatgctggagcttttgcaaaaactgcagttgctccattagaaaggattaagatactgttgcaggtaattccttgttttcattttcatctcaatttgtttgtgcatcttgtcttaaattatggttatcatgccacaatcacttcggttcagttcgccgttgcacactaccttttattccagcagattttgtgttattgatgctgtttcaattttgttgcctatatgtttaataatattgatggtaggaattttgacattgtatgacaccaaaggaatgaagtacatagaagggttttgtcatggcctacgcaaatggaaagttaagtttcgactactttaagtctgcatcgatgcttaaaagttggaagaaagcaaatgttgtaaacacgacgtgggacattacttgtgtctgctccaaaggggatgcagaacaagggatagattctgaaacccctttatttggacttactaagtagaaatttttcatcaataacccaagattttaccataaacccccacagagttgtacaactacataattggagtgctagtgtaccaggctgtctcaaatatgattcagttcttatatacaaaacacaaactggtccttctacactttcatcttctggtcatttaccagcgaagttgggacaaattatcaccatctacctgtagtgtttgttactttggggcatcaatcatttttcaactgcatgccatatctcgtttgttttttgttggattctcttgtttaaaggaatattaagttattgggagggtaaacctgagtcagttttgaaatccctgctaagctcttatttgaatgtgtaatgctcttgagcatgttatcgcgagtgattctttggctgcatgcctattttagttgcgaaaacataaattgtgggatttcgacagagtaccttgattcttacaagtaaaagataatctggctattgaaatagacatagtgatattcttcttgtctcttttctctttgcaagtttatcttattgttttatttgaatttttgattttaacagactagaaccgaaggatatcattcgattggagtttggcgatcgttgaagaagttactaaaacaagaaggtgttcgaggattctacaagtatgaatgtcattgattttgaatagtaactaatcgaaaattgtatgtggattgtaaataataagatttttttgttttgtgtttcagaggaaatggtgctagcgttcttcggattgttccctatgcggcattgcactttatgacttatgagcaatatcgatgttggatcttgaataactactctgcattaggaacaggacctatcgttgatctggttgctggttcaatagctggagggacagcagtcttagtaacctaccctctagatttagctcgaacaaaacttgcttaccaggtatacatccggcacaaattttatgccataaatctgtgtagtactttgagccctcgattaaaaacagcctcttgtaattgcaggatttcattgaggttgttttctttctagaataatgcctttcatcttgatacaactatatagatcttaagagaattctgacactaaccaaatttaggtctctgtgttagtagtgactttatttcagatgtttctgttttgcgcctgggaaggcttactgtttttcttcatgctaataaatttttatgctctgataggttctcggtagaagaggtggtagttttgggaatggcatgagcagttcccattcgctgccagcatatagtgggataagagatgtctttaagagtgtctacagggaaggtggggctcgttctttgtaccgtggaataggtatgtgtttttttcttcttctcatgtactaaacgtttttttcacactttccaagtatcctatctttgttttctagaattgggatcgttacttgtgttgtctggaaatctggctgacacactctcacgttgattgttgagcaggtccaacactcattggaatccttccatatgctggtttgaagttctacgtatacgaggaacttaagaggcatgtccctgaagaacaacagaaatctgttatgatgcgtctctcttgtggggctttagcaggactatttggtcaaaccttcacatacccgctagatgttgttaggagacagatgcaggttttccactttacccttccctgcgaatttgtttttacgctgcctttatcaaaatgttttgttacctagtttaagaacaaaccgtgatataggattggtccatctaggcttgaatcacttataacagacactatacctagggtaactgagaaacactggattatcatgaattctactttaaactttagctactagaggtttcttaggataagttttcatgctatagatatgcgcaatgattgcgcaacatgggcatggccgctgcgagaaatttttggtacttggtgagtggcaatcccctcccctagtctaatttgtagaaatgtcaataagacatatatagggaggggttgtttctttaagcttgaaatttttatttggttgcaaggtctttgagttttgatttatgggtatgtgatgtttttcaggttcaaactatgcaaccgtcaaatcatctaggtaatcccaggtacaggaccacaatgcaaggacttacctccatcattcgcgatcaaggatgtaaacagttgtttgctggattaagcatcaattatgtgaaggtaaattgagaagttatatttgtttagtaccttgcgtaatttagacaacagacgactccaacatatcttttaagctatgttatttgctttccatactaaattcatctcattgtgggtctacattccactttaatctttcaggcttttgaatttttattcttaaactttcgtcttctgattgttcaatatctggtgcattcagattgttccatcggtcgctattggtttcacggcatatgacatgatgaaatcgtatttacgggtaccacctcggcaaaaagctccgtctgcgtccgctggatgaatcaaaactaacatttagtttcattcctacagattattagccctatactttttaactacaatactctctgaatgcatttgaatttaacaaaatttctctattgtattcaatatatgaacgtgtacaaagatccttacaatagaaataaaaaccaaaccaaagaaatgaaaattggtttttacgttggcagattaagaaaaaagaaaaggtttctagatttgctctgtttatgggtcgaagaaagcatttccacacttgcatttccagtcttctggttcatagttggcatactggagattcaattggtcagttcgtgtaggcacttgtatagctgcacatgggttgcaaccttcacatctgtgcacacaacttggtggtcttgatccaactgtgctcaagccatcacatgcttcttcactcgcaactactacctccttctccgacccctgcaacttgaaccaaaacataaaaatcaagttacacaaaactcaaaacaatgacaaaaattggaaattggagagtaggacacagacatagagagtaacagtacccgtgtagattccactctagctggtaagaattctgtaccctggcctgtgaaggaatggttatcttttttatagttcttaaaaactgaaagatgttatgaaaatttccattattaagtatagtttgcctgcttaaaaaatataaaacaatgaagaacaagaacaggagctatagcagctttacttaccttgcagatgagcctcaatgttcctacttgatgcagaaacccagcacattagtagcaaaaatgctgcaactagaatcctgattcttctcttgtgttgtccctgaagaacccacatgatgatgatgttgtagatttgattcgactctaagctactcaagtctctttgaaagtgagggtgaaagatactgatagaattgagatttaaaggagaaaagtagagggactttaagaattttgaaatcactcacacttgatggatgttatttgtgttgggattccagaaggaagtgaaagtgaaatgaccttgtactatagtcttctcacttggattccaagtctatgtaaagtgttagttgcttcatcagaaaaacacagtcaacttgaactatagccttttagaaggaagaagaatttagtaaaaataaataactatcctcctgactgcaacagttgtctgtcactaaatggagaaagaaacttctgataaagcttctactgcaatttgttgcagtaaaaaacaggagataaaacaaggtagtattagttagattttcagtcaacaaagatcaagaatttaagtgatggtactacaacatgtcattatagaaatcctgcaatcatccgtctttttcacctttagttgtactgtctgtcctgttgattcatcatggcaaaaaattaccaaatcagttaaatgttttttcctgtgacagctttgaaattactgcaaataagaaactgtcttcatttactagattcattcattcaatcaattcagatttcagaggtggattcatcccagtaattacaagctgaagtcatttgcaaagaactgtatttgcaatgacctagagaaagtagtcaatggggttcttttatgtttcccttgtagctgtatcatggttgtgaatctgcaatagtacaaaatttacatacattgaaccatccctctctatactgcattctgcagtctattatttctttacagacaccttgtgagtcatcttacatagctgctgtaatgtactactattgaggcacttgccccacaaggccacaaccccatagtcgcaaccgttcaattttgctttccacattatcttttactttgccacattccgtgttatcatcagcatcggaaaatctagttaatagtccccaagttcagggcaataaggcgcaccatcagtaattggcgcctatcaaaaactagataacaaaccaagttcactgcacaaggcatcatcaacaattgccgcctgtcaagttcagggcaataaggcaaagacactgaaacaagaatacaaacgccatgcttcccatacagaggtcaacaaaaataaatcaaaaaattcatttgccatcaccccatcttcgaaacatgccatagcaatttcagcatttcaaaagcaggaaacaccaacataacaaggtaacagaattgcagaatgaagcagatcacctgaatggagcatctcggcttcccttcttacttaaatttatgaatcaaagaaggtgttcagtgaaccttaaaggtcacattatggctatccctgcatttttatagttctagctaaggcattatcttagattctaagctaaacattccaaaccaaagatacactacatccgctgtcaaccaacccgaatgtaatcgtataatcaactcaaaaggaaacagaatcgctgaataaagcagatcacctgaacatagcgtctcggctccccttcttgctaaatttatgaatagaagagtcactgtgatcaaagcatatccagtggatacgaattagctatctaccacattgtggctatctagctaaggcaattatctcagttaaacattcaaaaaccaaatgtacgctccatcttatgtcaagcaaatgtaaccgtataataaaatcgaaaaccattaacattatcaatgaacaatgtaagataagaaacttcaagtttttataatcctcataatgtcaaatcagagttatcatcaacagtatatatagtacattcattgccataccacaaaagcaaggactcaaaatcaaacctcaaacactcacatcacagtttatgttttcttccctttaggtgaacaaactttctccaaactcctcccaatggaagcaaagaaaccaccaccatccttctttgaatggtcatcagatgatgatgattctttctttggatgaattgcttcaactagtgcttcaatttcttctttagctctttgaaaaacactaggacctttgatttcctcaggttttgtgttctcatcaatatcatcacttgtcccatgagtttctatatgatgttttggtgacctatcagtatgagcaactgctgtgacctcttcttttgctctttccatcaaatttggggcttttacttcttccactttatcaaacaaacaaaatcaaaaatctattcaaaacccagtattcaaaaaccaaaattatcaacacccagtgatcaaagattagataaaaacactaataagaaaattcaaaatctgaaaactataaaggaaaaaaccctaattggctaattctctaattacaggacatgtatttaaaattcaaacagaacccatggagtacataagattagagatgttacctggttgataggcattttgttctggtttagattctgccattactgtgagaagaagaaggcttgttgagaataaaaatggttttgtttttcaattttgatttggtgatgataataaaagtctggaaaatgtattatatggttggtattttgctttaaatgtgccacatgttcttgtaataaagggacacgtaccaaatagtgctgtcttttgtatcagtgagaatctagcatgtgaatgagcatactactccttccctgcaaggctgtgccctctcttacagttgagattaagatttgtttaattattttaatttcttattaccctaccaccaaattcagacggtttagccgattggtctaaggcgccagaatcaggctcttgttcgaaagggcgtgggttcaaatgccacggcagtcactttttcttttctttgagtaatccgggaggggttcattgtggcaatgggtttgctattaaaaaaaaccggttttttttttgaactcataattgggatactctcggaaattgggatacttacaaaaataaaaactatttcgaagcgatggatcgaagaaaagaatcaccgatcgattacgatggatcgaagaaaagaagaagaagagaaggggtactatcaatttaggtgttaaggatttttatttaatttttaatttttatattatgataaaagaaagaaaagaataagagggggatacttaaaaaaataccccttagccagaattcaacctcatataaccattagcatccccaaatttacaggagtatccccaattgtgccttctttttttattagtataacttatataattcaaattttattttaaaaaaattgtttaatttaagttccaactaaatattatatttaagttatacgcatagctacagttaacttaagacacacaattaaaataaatttaatactaagattacatttagcttaagtggatcaacagacaaaattgtcagagtaaagttggtatcaagatctacagcaaagatttaaggacacctgaatctcaaaacaataggaagacccgaccctagctcccacgaccacacctcaacccttatcctcatggcctcagctcacccctagcagcatagaatgaagctcgggcctagccgcacatgatgaagttcaaccttcataggtcaaactcaactctcacgagagagactcaacccttggtctataaggaatctacatgtatgattccgagcacttccccgcaagatacaactggtcacaacatctctaagcctcatgaaatgtatggagctgactcatgagtatgaggggggacttaatgtcttccgcaagcacaactcgcccctatcagtgctcagtgattgaccgtgtctactttagggtacgattcttgtattatctgggattcatgattgattcttatgacattcctacgagataccctggtcattctttctccgggcttcgtgaccaactcctatatcaccctttcgagttgcatccggtcatgtcttccccatagtatggacacaattatgaatattaactcctagaacatctatgtgaaatgttcttgtcgaagaagagtcatgttccataaaagatggcccaaaacttaaaggaaaaaacagaaatcaaagaaaacaacaaaaagatattgatagtgttagagaactgctcggtcgaactcgcaagcgttgttatctcaagcttgtttgtcaagtttagtttccaaaactataagtcttgatttctagtctacttatagctaagtctcggattaggatagaaagtgtagttgagcattagacttaatggcgttcatcgattgaagacgaagaactactaaggggagcttgtggaacttcatcaacaaaaggtatgtggagacttgaactcatctatcactcaaaagtctatctactctatctcctatttgagacaaaagtcgtatggctatatagacttcaattatgcacatttgatatttcgacctgagtttaactcgcttacatatttctcgaaatgtgtgttgataagctttcgctttaaccaagttcatcttatattcttgacgaaagtcaaaagatgattatgtgaaaatctcctggtaacatcttacatgatttgtgtgagacagtcatttgatgtagactcaaaacgtttcgtattgatcattcgatcacttgaaaatttctttgaagctaatattttgtgtgagacagctattgtcgtcttccgagaatgtttgaatggttaaaatgagagtttagaacagttggatataagcacagtatgcgtacttgcatatgtgtgatccaagtccgggaaccatggtatgcatacccgtatgcgtactgattggtttagtagaggtcctggaactaagcacgcataccggtacgtgtactggagtgaggttcaagtttcgggactttaccgagtttggtggtatgcgtaccggttcgcatactggcgaacccaaacttagtccgaccactaaggtacgcgtacccatttgcatacttgagtggattattgtaaagactcttaagatcgtcaacgttattagactagttaagagacttattagccgataataactcgactagtttaacatgaacgttaataattataaattaatctaacaacgatctaaatacgaaactagtaccattggatgcggggttggttatgaaaataaaaacctgctgtctatgggtgcgaggttggttttagctaatacccgtccgaaacacccgctaaatatacacccttgataaaattaatcctagccgtccgttatgaaaaccctaggttgataccacagctccagttcccatcttctgatcctagcggatgctttccttcctccggctacaacagcacttcctttctccctgccatctattctctatcgatggaagttcagccaactgagcaaatagcctgtagctccatctccactcgaacaaacatccaacttccattaagccacaacttctcttttctgaccttcttacgcacttttctccgtctgatcactaccagctgcttagatatgacaaaagagatgtgcatacttgacacgtcatccactaacaaagaaaaaattctttgtttcatttaaccactagctctggacctatgtatcaatgccttgacaacccacagtctctttggtgcagtgacaggcgttggtcattttcgtcccaaacgcgtctaccgggtttaaacccatacccgcccaacccgtagcaggcggataaaaaaaactgcccactgattgtgggtgcgtggttggttatgacaataaaaatccgcaatttataggtgcgaggttggttttagctaatacccgctcatacccgcccatgtacagccctggctcataccaacataaacatcctactgctcataccattttgcactgcattcatagtttttgtgctaaatatgatattggtcccaatttcattgcacacctatggataaaggaaatttcttgggtagcagagctataactagcaaagctagttcagcagtacaagccgagagttctgctctcctcaaagcagtcacttgacttcaatctaaagtttcatggtcagggtgattgtaaaaatatggctactgctttctcttttagctatagtttgcagattctacttaggcaggtttcatgatgctttggccaagtttaattggttatgtctcggtcttgatggtttagtaagtttcctaggatcctgaatactatgttaaatagaatcgaagtatgtgcattagctgttctctttctatcataaaaaacttctgaggtttttgttgaaaaattcaatggttttggaggaagtgaatcttttctagtgactcacttgataatgggagacaagtaaggcgatttaagaggaatgtaagggtacttccagcagcttcttcaagtatccaaatgaactttgtttaacctttgaagacgatattgggagcttactagaatgagacatctgaagctatttaagagtaagctaagaccatttccaggtatcacatattctttcttttaaccttttgagctatttttcatagatcttccacgagtcacaatttttcttcgagaatgcaactatataactctttcccaacaagacacaattgtccctcaaatcgggacagggtatgacagcttaagccagataggaggttaaaattctgttgaaaattctttcagtcaaaggatacttacaacctttgatctaaactggacaaaagttgcaatcagtatttgctggaatatatgtaaatggagatgttctatagtttttgactgagaaatttgatcttggtaaagttattaaggatgctagattctttgtattttcttatgatgaaccatgccctgatatagtgaggaaccttagaagatcagaggctaagcaatgtgacaacgttgttttcttggatgtgttttaacaattaacaaaagctcggagaaattactgtagatcagccatcggcttgcggaggtgatttctggaggatcactatttattcgtgttttcttcttcttcttcttttttttttttagaaaaacataaattattattaccataatctcttgaagattttgttgttttagagtcgatcgacaatgcgctaataggttttttaacctattttctttgatttgttattttctcaaaattaagtgatcacaatggttatgtatatgaaatatgacagttatttataaactcatgacaagtcttatgagtcccaggctcccagcatttaaatttaaagtggagtaatcacatttcacttgggtagttctttaaatattctatacccgtgtatgtttatatggttgatggattttagtagcgtcggaaaagaaactacacccaaagtagtgaaatagaagaactacgtgatgtgctgtctgcactagttctctgtgcttttggtgaggaggaccaaacagcccttaattctgcttgctccataaaggtgcagaaattggagagcttgtttcaatatttcggcacgactgaaatccaggtgtattagggcctaaccgaaggtgatattgagttatattacaacctccatcccagaaaaagtgatagcttccattttttgccatttttgccaaatacgagacaaattcagaaaataaaaatatcatttttcctgaaactgaaataatattttcttatgcggtgacatagtccatgaaaagacaaatttgggcttttccatttccattactggaaagtaatttttgaatgtcaacatgccatatatgacttggtagttagtaacctccttttcccttttgcgtaagaaaactggaaactgaaaatcatcaacgtttaaaatgtgcattagttgccaattagtgaaaaaaacaaacccccatgaatttcttggcaacatatcttgattaagacattactatatcatagttttcataaattgaacttggtatctatttgcttcaatttttagaaaattgcgggattctagttcatagacttaggcccatgtgggtagtttcgatacaggtttgaaccatggatttttgccaccgaaacagtatcaatagtatgctgctacaagtaggaaatcatttttcaagtgtccgtttccccgtcataagttgtttggatttggagtgtgtgtgtcatcatgagattgagtccaccgcgtgcatcaactaatccttgcatgttgccgaatcgatgagccaagcgggatggccactcgtcatttcctcatcaaaatacgcatgttgactttcatgtgcatctgtttctcatttctgggtcaccattaaaattaaaataattatttttggtctaccaaagtagcatcgagacatgggaaatttggctaacacacaaatctgttgaaaattgtagccaacgacagcccgatatgcccggcaatagtatcttccaagggacactccctgaacagccaaggttggccttataattcgagtgatagtcatgcaatatgtacagtgctagggagatcccggttttccaacccaaagtttgacacagctgtctgtcatgcatctaagccttggtgtgccaactttcggagtctttctcgcatgagactccaaaatacatgatggaatggatagtgaggataagaaagagaaatgcagctctcggagactcggaagggcgtgttagagcaaaaatgattcacatcccgtgggtccaatccgccggatcactaggccttttccttcttttttttcttaccggacgcaccgcgggatccagcccgcccacggtgagtctaggtgttagacacgattatacttgatttctccgtcaatcaatttgactactgttggttgattaataaagtgacacatatggtgctcaagtggtcattccagttattacttgcacaaatgccaaaaccagactcttacactcccgtagactttaagtcgttgaggctctagtgttagttttggcgccaatcaagtttgtgacgtgttgtcttgtctaagagttgggacattttcaagattgctaacaggggtaccagattaaatgggggtgtatcaaaatcaagataagacaaaacaggttttcataaaagaaaaataagttttgttttggcttggtacatctacactaaacctagcaccccattaacggccttagcgaccccgttaaactcatctacatcgaaacaaatatacttggcaaggtgagaggcccacggcgtacgaaaatgctattattattgtcaaggttttgagtcttttcgatctctcatgatttctatttttattgtccaaaagttaaatttcccaatagcagtttccatctagtctcctcttactaactttttctgtcggcctgatgaccccaaaattaaaagacaccccttttttccaactcaaaagctgatacttgattctactagcttaagctgagtctggcttaatcaatcatctgatagccatcgcttttgatcattagcttgtataaacggaaaatgggtcattcgttcaaatatttttaaaacatggttcaaatggacgagtaaaaattagtattggtgaaatggacaaaaaaaaatttaaaaaggatgacttaaacttaaaaaatagtgaggatgaaactggatacatcctgtttaaattaaaaaataagaaaaagtatttgaaaattgggaggataaaactgtttacatcctggctatttttacatttttgtccatttaaagagtatcaaaatctaagtgtccttttatcccaggaattattggttttggtctttttaaccaattttgtgttgtataaaccgtccgcttataacctgtttggttgaattttttacatctggaaacaaaaaaaaaaaaatcagaaattaagctctaatttagattttatccattctcaccagtcaagcagctattgatgtcttgagtaggctgacaatccggtgaatttcaaaccctcgtgacaagaaattcttgtaacccatggactttcatttccggtggaaaataaagcttgaatgtcaacatgcagtgcatgctatagatatgaatggaaattccgttgagcccattatatgaaggaaatcaaatttgaaagagatttttgaatcctatattaaaacgtttaaaatatgcatcaagttgccaataggtgaaaaaacaatctccatgaatttcttagtaacttatcttgatttagacgttatcatatagtttgtctaaatcaattttgaatatatagttaggtgatggctaacgactccatcagattattataaatatacttaacgaattcaaaaaaaactggtaacttgttcataaaattaggtccatgttggtagttcaatgcacgtttgaatcacgaattcttcttcttgatacttgaattcattttccaagtgtccgtctgcggtccgtctctaagaccgggtcttctgaagatacccaacctcttcccaaattgcttttacatatcagcttgggaatagcctaaatccagtgggaattgcttcaacactttgtgtagacttgaatttgtttaacattgttattgtagggacccatatcttaattgcaagttatatcaattgttatgtttgaaaaagagatattttagattgcccgtctaattcttttggtaatttagatgatatagatgttattatgatcataatatgctgcatttttgttggaatttaattgcaaacgttgttggttgtaaactttgttgtagtttaattctagtgtcaaatttgtttgtttttttttttttttttgatcggtaaagaagaagtttattgatcaaaaaagagagggtataaaggctataccaccctaaacaagaaaaaaagaaaagtataggaaggtaacagaccaccaacctaagaagaagcaaagtaaatgttacaccagtcggacataacagtagaggagtttacagactcaaaatctttaattgctaaagcccagcaaaacaaacagtaaatggcttttttaactactccaaaaacagtgtttctagttgtagtaaaaactctagaattcctctccttccatatactccagatgatagccactggaactaagttcaacactaccatactagctgcattattatgatgaagatgacatgcttgtaaataaggaattatatctttgtccacactataaaaccattgaagcttgctccgaaaattataccaaacttcacgagcaaaagagcagtgaagaaggagatgtgaaatggattcattgcagttgcaaaagacacaactagctgggacatcaatgcctcttatcctcaataaatctcttgtgggaagtctataatgagcaatcaaccacaagaaaaatccaatctttgtagggcacttaagattccaaaaagtaaagatagagctttgttgagaaataccattttcattagataatttttcataagctgatttgacagtgaagcacttaccttttgtcaagggtcattgcagttcatcttcttgatccacggtgagtctgaaagaagataaatctgaagtaaggatgtggtactcagttttagcagctgcatttagtcttgaagggacttgtaaattccaagaataagcatgaccaccagagttacaaatctcagcaactgagaggtgtttaactcttgataaaacatataaatttggatagcaagtcctgattggttggtcataaatccagttatcatcccagaatcttacagaatttccattatttacattgaacttaacattcttcagaacaaaagatttaaacttcataacggatctccataaagatctcccataagtaattattggagttttaggaatccaacctgcttcttcactgccatatttttcttgcacaattctcctccagaaagcatcttcttcaattgcatacttccaaatccattttgagaacaaagcacaattcatcttctttagacatttaataccaaagacctcctgatttttttcttctactaagagccttccatttcaccaaatgtatcttttttctacccttattatcattccataagaagtctctcatgattttctctaactttttcaaaacagaagcaggtatctccaaagagacatatagtatatggggaaactgtttaggacactgtttattaaagtaattttccctgctatgtaaagaagaacttttttcaatccaactaacttagcaatgaacttctctataatcctgtctcaatttctctataatcctgtctcaattagctacacctccacacttatctcctaaaggcagaccaagataaattttggtaaaatacaattgtacgaaccaagaatagaagagaaagtagataaatcaccctcatatgcaactccaaaaatttgcatccaatggcatgtcgttccagccacatctttgcaccaaggcatgccaaccatgccacatgtgccaatggcatgccatgccagccacatcaccgcaccaaagcatgccaaccatcccgcatgtgctaatggcatgccgtgccagccacatcaccgcgccaagacatgccaaccatgccgcatgtgtcaatggcacgcggtgccaaccatgccagcctttccttcacgccgctggctgccaaaacgaagggttgcaacaatcaacgaccactcttccatctaagatgcagatcttagccgtccaatgtcatcagccaacgcgtgacagcctttggcccaacgccaagccctaattttggctgcgcccaaactatgccaaaaccctagtttttagccgcgcctaaactaggccaaaatcctagcttggccacacctaactatgtcaaagccatgtcggccatgctttcatgtcgctggctaccaaacgaagggttgcaataatcaacggctatccttcccctcaagatgtaaaatctcggccgtcgaggatcaccaccgagccggcaagtctcccaagctcaactttccaaacaacatcaacatgctacatgttttccacgaaaacactcgagacatcaacacatgtcacaaactgggggatgctcattagggtattggtttggcggtttacagcgtgcggtgtacattacacccgttacaagaaagtgtcataagaatgaggcggttagtaaatacaaggagtaatggtgaaacgtttccttcattatggaaatatcaattccaggcgttacccattaccgtttccttccatttactaaaaccgtttccaattcttacgagaccagggtacgtttctttgcgacttgtataaataggtctcacctctttccaccaaacaacaagttttggtcaggagcatacaacactcagaaatcacttgttagctttcccatctgttagatttcactttctgatacaagtcaaaaaactactcttctagaatcaactactctggtctcaacactctcttcgcttccctccccaaaaccaacccttcacctgcactttgtgaccgaagcaagtctggaacgacaattttttaggccggatttgtacagattgatctctcggatctaaagtactcccttgcagtacattgtttagggttaagactcgtttctcacccacaacacatgaaattaccgaaaccagaagaaactgttttcacgctcaaacaaccgcgtaaaaagggagagaaagtatcgtgttggagggggtggtgtcgtatgatctatggttttggcatgcattttttggtatgcccagctctaacaacgatattaatgtgatgaaccgttcatatgtttttcgaagtcttgtcacaggaaaagcaccaccagtgaactatgaggtaaacggatatttatatgatatgccatattatctaggcgatggaatatacccagagatttctactattattatggccattaaacatccggttggtaggaaaaaggaaatattttcagcgatgcaagagggttgtagaaaatatgtagagcggggatttggtgtacttaaataacagtttggaatcatcaaacaacctgcaagaatgtggaatccagatgtgcttgcttatatcatgaaaacctgtattatcttacataatatgatagtcgaggatgagcgtctaccggtgactggacacatgtttatgaacaacgtcgcaacccagcaccgattaatatattaagatccaatagtgaggagttttcatagattagagctgagcaacgtcgacgtgcaatgcgtaacaaagatacgcatattcgcttgcgtgatgacttgatcgaacatatatagtcagaatatgggaattaaaaaattggacacaaggacatgtttaattatatggactatttttttatgaaaattgttgtttgtcattttcttgggcaggattatctcttttttagaatgattaaattagaatgttgtatcttttctataattgttattcgtaagatgttgatcaatacttgggcagtattatctcttttttatataatcatcatcaagttttaatttacgtaagttgtttcaaaaacatttaaatttaattcagtttcaacaaaaataaacttgaaatccaaaaattatataataatacggctgattataacaataagaaatatcaaaacataattaaactactaaagctattaatcactaattaggagaaacaattaaggtttgaactattccgcctttgtgttaaaattggtttcttctattccgaacgatgtccgccttacaaagttcgaagtactccttttgtacaggatccaattttccaagatccatcataatgatgcgaaattcgtcgtcttcaacttgcttggctatttttgccgcatgttcagcttgttttgctgcaaattcggctgttctttgttccatcttaaatcttgattgtgcttggtaatgagtattgaagttttgttgttctttaataactattcccatcaattccccttgggcactggatttctctctccctgttttttcagtcgttcgctgtttttttccccatcttacggagatatgtgttctctatgtctcccatgtctgtgtcgttaccgtactcgcgttgagttgtttcatgatgtccttccccatcttcctcattattctcataactgtccaaatcgtgcgccgtatcgaatcaaaagtagatcgccgattatattttatattttctaagacaattggatagcactcttcgtgcttaaatttttttccatcattgcattccttgaaccgcttgtttacttcttcaagctgttaatgtttctaaaaacagttaagttcattggcgtgtaaacagtagaaaataattgttcaacaaataaagaatactttcctttttttcagtaccccatccagtatgatattcaccttctacttacgcctcttttgccgagaacaacgcgacatctttacttattacctgatatcgtttttgccatgaactccaagacctctatggattattaggtaattgaagttcaatatcatctttgatacaagtccacaacaccgcttctgcttgatcagttccaacaccaggatcttgagatattgataaatgaattctacacatcgttacatcttcgattgttgaaaaatttggacctcgtactactcgtggtgccattgtaagcgattcaatgaaaaaattataaataatttgaaagaggaaatacttcttctgattgatatatagtttgaatcagtagttgtgggtaaatactaaaggaattcatgtgtatatataggtgtatgatagaaacctttaaaattcgaaatttccaacgttccaaaatatctttcaaactttccaatccaacgttcgaaaattaccaacggtataaattttatgcaaaacaattttctcgtttgaattctcttttaaaaatgatctgtaaatggaaaccctgaatggggtgtacatattaacaccgcctgaaatgaggcgcatactatacaaacgcctgaatggggcgattataaagtgttcgtctgattgggacgtacataatacctacacctcatgtgaggcgtgcattttatttacgcccgatcgggcgtacattttacgtgcgcttcattgaagcgtattttataagtttgcctcgccatggaacggggactatataaccgtttcacacgaaacgtacattatacgttcgtccgttaacaaacgtacattatacattcgctcgactatatttagttttggtcttggtcccagaccaaatatagtctggaatttggttttggtccgaattttaatttttaatccgtcccgctgtgtctcgatattagaacatatttataggtatgatcgaccactgcagttgctcttgccctaaaaaaaactctatcgtctcttctttttttctcacttcttttatacatgcagaccaaatagtaaatgacagctcatcaagactcgcttcgttgctaaacctatcacaatctacttgcacaatgggttacctttgtcatcgttccccttttcctcgtcatctctccgtactttgtcactttagtggttaattagcttcgcctattcgtgtctcgtcaattttactacaatccttctaacgatcaatttgactcttgtgctcgctcattattaaatgcccaactatccagttgatcccagccgtctatcctttatcaaagctttactctcgttatcatctcgtcaactgtatatctggaaagcgggaaaagtgactccaagtatctcgttaatgcacaccttatatgcttcttatgggggtgttcgagctctcagattcgtccatgtggacgtggtggtgagattttctgcccccacagttgatataatcggcaggtcaatggcatattattcatcaactgaagtttaaaaaagaataccttgacgtcttaatcggttggtccggtggaggggtagacgaagcgagaatggggcaaaagtgatcaatttttaaaagtagccgactttattacactactagtacatgtattatatcggaccaactgctaccaatggtagaatggataagacagagaagtgtagctgtcggaagggcgtgttacagacggaaatgctttatttctccgtaaaacactttgactactgttggttggtagtcattttcatttatatggctttatttgggtaaatgccaaatccagactcttacacgaagactttaactcatcatcagtcaagcttgtaacgtggtgggtttgcaaggattgaacttattgactcgcaacttttcgaagttatcaacatctaccaaattctcttggtaaggctcacgacagtagaaaaatgctattgcatgcgaagattttgatcacatgggatttcaattttattgtccaaaaactaaacggaaaatggatcatttatccaaatatttttaaaacatggtttaaatggacgagtaaaaattatatgggtaaaatgggaaaaaaaatagtaaaaatgaaactggattaaacttaaaaaatagcgaggatgtaactggatgtatcctgatgtaaattaaaaaataagaaaaagtatttgaaaatgggtagggtaaaactgtttacatcctggctattttaacatttttgtccatctaaacagtatcaaaacctaaatgtcttttttaccagaaattacttattttggtctttttaaccaattttatgaaaaaactcaattgaccaattcagctaaacacataccaacctactaacatttctgccggatgaccccaatgggcaactctttttactaactcgtaggttgatatgtgcttcattctactctagcttaggctggctcatccaatcatttgacaggcattacatcttaccattagcttatttatgaaaatagtacagttttttgttttccgacacactcctaagaagaatttactcataggacaaaacaaaaccgagataaaatgagactccagtcggaagtttcatataacaaaagaaagaagctgaaaagtaaatccaaaataaaagatcctggagtaagacaaactacaacaactagtttatactccctctatttttggaaaagagatatacttttatttttctatttaaaactaaatataggtcaaattggagaaaaaaaatatgaaagcatcacttttccagaaacgagggaaatattaataaaacggtaacaatataattaccaaaaattaattggagaatatcaagttgaaaaaaccgtttttggaaatcaatagttaaactggatgtaaataagtaatatacatatataaatatacctattaaaatgcatgggatgagacgtgaacccaaatttatagtgtgggtgcccaaaataagaccaccacactatttctctaagtttgatataaattaaaaaactatatttttaaatgtatatatctcccaacagttgggtgtcagtgacagcattggggggtttgtgagagtgatgagtcatcgataaataccacctaaaataacaaatgccttgataatattatcaatcatccccctaggtgcataaaataacaaaatcactcttaggcatagcaatggatcagttaatgctatacccggtaaaacacgggtgatgaatgggcttattttaattacaacaggacatattgtacaactactaccgccgtgaaatggatagggataagaagacaaaaaatccagctcttgaaaaggcgtgttagcgtgtataagagtaaagactggagtttagtaagattttagaaagaaagatcaaacaagttgactgtcgataattagctgacatatatagtactgcgcaaggtgtcatttttagaatcttaatcagaggattaagctctagttctgtccattttcttcacgtctataatcaaaaggattataaacgttttgactcgcaacctgctaaaattactcgacatccttgcaaatgtgcagttccatcgaattaatattgcaaaaattctacaagcccaaaagtataaagtaattgcacacatgcacttctaaatccgctatgtcactttgcaactgtatgctaattaacaaggccataaaagcaacatgcatgcttgcggctttaactccaaaaactgtggtaccaaaatcttattactcccttcttgagaattgagtatttgtaacaaaaagctctctatgaagtcacaaattctgcctcaaacagtcccgttttcatcaaaaaaatctttattaaaaaatcttcgtctgaaatcagtgaactgtaatcttcaaaatttcaaaccctcgtgagaagaaattcttgtaatacgaaacccatggacttccatttcaaaaataaagctatgctatctaagaatgtttgagaatttcgttgagctcattatatgaagtaaatcaaacttaaaagaaatttgatatagagtcatgtaggagtaaaatatcgcacattcgttatgtatgctaagtaaaggtcatgtaatattagcgaagatcatcgcacatagcagaattgagatgacgtatttaatgatatcagcacaatcacgagtaaagtgtgatgatatgtgcgaagtgtaaagtatgcgaagttgaacaaatgtacatgagcgattgtaacgtatagtgattccgaaaataggggatctattagctgtcatccactatgtaatgtgttatataaagggaagggctatcatgtaatgggagagatctgagagagtgtgttagacaagaaactaggagagaaaaagtctatttgggaagcaaatagagtctttgtatcgtcttgaatcaaacttaagatcttaatgaataaataaatgaatgattacaagtcctaagttaaaacgtttaaaatatgcatcaattaagttgccaataggtgaaaaaacaatcccaatgaatttctatgtaattaacatatcttgatcaagacgttatcataaaatttgaacattatacgtgacatcactggtggctaacactcgctgcctccatgagattataattattgaagatttataaaaccaagtggtaccatataatcagggtccagccaccgctattttatataccagggaggatatacacataacatgagaaacacttggttgatgtcactagactttgagtatgtatccagtgtttctaagttttgaaaaggtaaataggattggctatcacgtcaactttcttgtacttaagggtgcacaggaaccgacctggaccgaggaaccgtcccggaaccggcggaaccgagccgatatttgtcccgaaccgaagaacggggtacaggtaccggtccataaaataggaaccgaggctgatgaggtacatgtacacggtcctgtataagtcccgtaccgtccggaccgaaagaaccgacattagtatgtggaatatttctttagtgagtattagggcataatcctttatcctctatttggtacatatattaaatgggaaatgtaattacctcttggattatgtcatatgtgcagatatgttgtaactgctgttacttccattcatgaaatgaaaaaagggttcaacatcgtctttcaatggaaagttgctgtacagccccaagggatcacacgtctatgaggtaagaaacatctttattgtttattctcttcaattgctgaaacctgaaacctaactatgtataaacttttcagtctcacagtttttgtggcgcccaaggccaccatcttgcttgactgttgaaaaggaagaagagattgctaaaaaccttaagatatacaggaagaagtgatcgaggaccaagatgtcagtgctcaactgagcgagcaggataaagaaggcagctgcaagaatcatgggcatcttggattgtgaaatggaaaatgaggcagcacttaagagatggtgaggctagtgctgatgaagaagaagaatatgaagccaaacaagttgaggtccaaggaaattttggatgttagggttccagacgtttcagcccaagcctaaccaataaaatccaagccaaataaggtaccgactggtaccggtctcgtaccggtcccggaccagaaccggatggtaccggaaccgaggtacacggtaccggtaccggtcccaaaaattcagtaccgacctctgggggtacaggtactcggtctcggcaagaaccgagccgaaccgtaccgtgtgcacccttacttgtactacctcaggttctcgaaaaactttattagtgctaatgatatatgcatactcacatcggcaggttgagatttctcaaaatacatagttttcaaaaccgggtactcactcggtttcaataaaatagtccgatgtaatttgtacataaaaccagactattttttttaagtggagggactatgtattttgatttactatctccggttctataaaccaacgtttccagaaaaatcatgggacgtctctaagaagttagcatggtttacaaagacttttaaatggtgaatggcatacacaccgaactaaagccatacgagtttgcgtcttaatcagtggaggggttgacggactaagaaaaggggacacaagtgatcaattctaaaagtaaccagctttattacactacttgcctatgcatgttctaccaactgccacttgtacaatggtggaatgaatagagggacaagacagacaagtgtggctctcggaaaggtactggagacggaaatgccctcaatgaatttgattaccgttggtcgattaatgctacacacagtacaaacatacgagttaaatcggagtcggtgtaggtttgatgaactaagaaagaagtagggcaaaaataatgtgcttattttaatgacactgctagtacatattgtacaactcaacaactattggtggaagttagattcaacctagaatattgaagctgcaacaagtttttggaaaccaaatttacttggttgcgtttaagagtctatcatgaatattctagaaatttaccaagctatatttggaagctacgtttggtcttttatttagtagtttgattgtttaggaagtttttttatttttgaaactctgattgcctttgaactaatataaataggctatggcttggttgttttgtatgtgcatcagaagggtttatcggttttaatagactcttgtttagcaaaagttctttgtgtgttcttcgttcttttagttttatcttcttgtcagatcctacatctggcatcaagagctacaagatcctaggactgtgagaaagaaattgcagggaagatggcatccagttcaagctcaataaaggttccagtatttgaagggaagaattttgagcattggagaatacagatggagaacatattcaaacaccaagaggtatgggatattgttgacaccggttatgttgaacctgaagctaatgcaacttcaactcctgagcaaacaacaattttacaagaaaataggaaaaacaatgcgaaagctacctatattcttcatcaaggagtacatgaatctctctttgatagaattgtgtacatcagtgaagcaaagaaggcatgggatgctatgaaaacatattacaaggggtctgataaagtaaagaatgtatgactacaaaccctaagaagaaaatatgagttattacagatggaatcatcagaaaaaatatcagatttcttctcaaggacattaagtgtagttaatgagatgaaatctaatggagacaatatagaagatgctgtaattgtggagaagattctacgaagtttgccagaaacttttgaagcaaaagtaacagtaatagaagaatgcaattcagcagcaaccatgagtttaggtgaaatattaggttcattgcaagcctatgaacagaggaagacaacgaatttgcttaaaaaaccagctgaggaagcacttcaaagtcatattaactggagtaatgtccaatcatcaaactcatatagaaaaccaaataataactttggcagaagcaaggtacgctattttaattgcaataatttaggtcactttagaagagagtgtcctgaaaacaaagttcaaaaacggaataatgcaaactttgttgagaaagaagaagaggattctgaagttcttttactggcatgttttacagctcaagaacacaataaaaataagtggtatcttgatactgcgtgtagtaaccacatgtgtggagtaaaagagctatttgtggatttagatgaatcagtatccacaagtgttaaatttgggaacaatgagacagttcctgtaatgggaaaagggaagatcggtattattctcaataacggagcttactcatatatcttaaatgtttattatgttcctggtctacatcaaaatctacttagtattgggaaattagtagaaagaggttatagtatgaatctctcaaatggagtttgctcaatacgtgataaaaataggaaactgattgcaaagatgaatatgaccaagaataggttatttcatttgaatatacaatatcaaaaggagatatgctataattcagaagtaccagaaaattcagcagcagtacaagaaagttcatcaacataggatgatacttgactatggcatatgagattaggacatgtcaattttaacagttttcaattattatcaaaaaaggagatggtttcaggtttaccatctataaactatcctgagaagaagtgtgaaagttgcatatttggtaaacaacacagagaaccttttcctgtgggaaaagcaagaatagcaagacaacctctggagttagttcattttgatctttgtggtcctatggaagaaatttcacgtggaggaaatagatatttcatcacattcattgatgattttagtagaaaagaaagggtttatctactaaaacaaaaaagtgaagctgctaatgcttttaagaattttaaagcatttgttgaaaaacaaagtgaaaagaaaatcaaatacactgtgaatgataagtttctagaagactgtggtattcaacatcaaatgacagcaagatacactccacaataaaacggtgtagcagaaataaagaatagaactatagtagagatgatccgtacaatgagaagagctaaaaatctgccaaaggagttctagggagaagttgtatcatgtgcagtttatttgttgaatagatgtcctaccagatgtctactagacaaaaatccagaagaagcactaacagggagaagacctagtgttagacttatcaaggtgtttgggtacatagcatatgcacacataccaaaagaaattcgaaagaaactagacaacaagagtgaaaaatatattttccttggatacagtgtcgctacaaagggatataatctatataatcctgagtcagtggacctggaaatcaacaaaagaaaatattgttgctgatgaacgagaaattgtaactttgcaagatactgttataaaagatactactcctactactgtggaaactgcaacacaacaagaaggagaagtaacaacacgacctgtgcgtaatcgtgttgcaccaagacgactagaagactacgtggtgacaagagacgatgagaatgaatatgaagatcttgttcagtttgctttatttggagacagtgatccaatcaatttttaagaagctactcaaaataaaggatggatagaagcaatgaataatgaaattcaggcaattgaaagaaataaaactaggaaactcattacacttccgcatggtaaaaaggctattggggttaaatgggtttacaagataaagtataaaccaaatggtgaaattgatcgtctcaaagctatattggttgataagggttacaaacaaaaacctgggattaattactttgaagtctttgcttctgttgcaagacttgacacagtacgtttactaattgcaatagctgcacaacacaaattcaaaatatatcatatggatctgaaatctgccttcctgaatggtatacttgaagaggaggtgtatgttgaacaacctgatggttatataaaagaaggtcaagaaaattgtgtatacaagctacacaaagccttgtatgtattaaagcaagcaccacgtgcatggtatacaaggactgatacttacttcatcaacaatggttttgaaaagtgtccttatgaacatacactttacatgaagactgattctcaaaataatatgatcattgtgtgtctatatgttgatgatcttatcttcatgggcaacaacatggatatgatcaaggagtttagggaggccataataagagaatttgagatgactgatctaggtctcatgtcttgctttcttggacttgaaatttttcagacagaagatggtatatttgtctcacaacaaagatatgcaaaggagactctgaagcgatttaaaatgaatgattgcaaacctattttaactcatgtttaaagtaggttaaaaattacaaaagaaggaactggtgaacttgtaaatccaacatagtataagtgtttggtgggaagtttacgttacttaacttccacaagaccatatattatttttggagtagggttgatcagacggtttatggaatctccaaagcaatctcatctgcaagatgcaaaaaggattctaaggtatatctgtggaacaattgattatggtattttatgtaactctacaaaaactatgaatttagttggatacattggcagtgattgggtcggagatattgaagaaaaaaaaagcacctcgggatatgcttttcgtatagggtctgggtatttttcatgatcatccaagaaacaacaagtagtttctctatcaacaacagaagtagaatacatatctgcagcataatgtgctgcacatgcagtttggttaagaagaattttgaaatctcttttcaatgagcaaaagactcctactcaaattgtgtgtgacaataagtcaactattgctcttacaaaaaatcatgttttccatgggataagtaagtatatcgacatcaaatatcattatattcgagaactggtcaacaatgaagagattactgttgagtactgccaaagcaatgagaaagtagctgacatatttacaaaacctttgaaaggtgacacatttgtgtacttaagaggaaaactgggaaggatgggacaacatagtttcggcttgagggaggctgttggaagttagattcaaccgagactattgaagctgcaacgagtttttggaaaccaagttttcttggttgttacgtttaagagtctgtcatgaatattctagaagttcatcaagctatacttgaaagctaagtttggtcttttatttagtagtttgattatctaggaagtttttttatttttggaactctgattgcctttgaactagtgtaaataggctatatggcttggtagttttgcatgtgcatgagaagggtttatcggttttaatagactcttgtttaacaaaagttcattgtatgttcttctttcttttagttttatcttcttgtcagatcctacaactatgaaattgacggggataggaagacagatattcagctctcaaaaaggcgtgttagcgtgtgtgtatgcaagaatgacactattagcatgttagttttttttgctgatttgggatccgaatctggctcggcccgtgatttgttccgagtcaaatgtcagatcgtttgttatttttttgagtcatatctgattcccaatttgagtcagatctaaccccctgactcggactcttttgaaccaggtaataaaatacccctgactcataggaacatgctactgaatcgtatttttgagtcagatgagctgatctgactctaaaaacaaacatactaagtcagatccggatgagtcaagtgatttcagtcagatccaaacgagttcggagaaaacaaacatggtacaagactggtttccagtaaagattagaaagatcaaataagttgactatcaattaattcactaacatatggtactactgctcaaggtgtcatttttagaatcttaatcataggattagaccgggtcttatgggcatgcccagccacttcccaaacgcctttacacctcagcctgggaagggcctggctcttgcggtttttctcagggaattctaggaacggctaatggttggccgttataagccaaaaaaaaaaacggtaagtgatcaaccgttcttcaaataacggtcagacattacccgttctttaaaaacggtttttcattaaccgctctttttatcttgaccagtcaacccccgttgaacgggctgatggttgtccgtttccaatttaggctaaagttccaggaacaacgaacacatttcattccagtttaactgttcttccccttttttttctctcttctcaaacaaaaaccccaactaaccagataagcatcacctacagaatttctggaattgagtttgttaaggaagctcttgattgaaagttgaggttatttttgaagaggttaatcatctcaataatcaaaggtaatccaacaaacttaaaaccctaattattattctttttgttttttcaattcaaaatattttcattagttttgagatgaataacataaatttaatctaagtactattagttaccactttaggaggacttgaatttgtttaacattgttaattttagggacttaaattgtatgtctaattctctaggtaatttacaagttatatgaattggtatgattgaaaaggacataatttagattgtatgtctaattgtctatgtaattttacaagttatagatattatcatggtaataaaactctgcacttttgttggaatttaattgcaaatgttggtggtaataaactttgttatagttgaattcttgtgttaactttgttagatgtccactttgacaccatttaattgttactccggtgttgttgttaattgaagcatgtctttaaggagatatatgtcaatcaaattgggggttcgtcttgcagatgattctgatgaagaagatacaaatataagacattgatctgatgagtcttaagacaagtacatgtattttattggaaaagtagtcgaccaaatatgttatgacaaaacatactgaagattcaaataatccaaatacattatgacgatgctaaagttgcacttgaaaagaatactagatggacacgtataaaagtgaatggaaaataaaatcaggaacagatgtggagttaaataaatgatgtgaggtgatatgtcgaaagatgaaaaatacattgatacgtcaactcaattacataatctccaatagtgtaataaaatgagtgaactgacaaaaccgacaactggtgatacgaaaactcaattacaaattccccaatagtgtaataaattaatgagtgaactgacgaaactgacaactggtgataagaaaactcaattacagattccccaatagtgtaataaatttatgaatgatatgactaaaccgacaactggtgataagaaaactcgaccgacataatgcatcagtaaccaaagtgaccacactagaccaaaaaaatcagtagggagatttgaaaattgagataccaataagacatgaaatgtagtataaataatgtttctctataccaaaacaacacaaccaaattatcaacatcttctttatagtggatatatcttctgtttaattttcagcgcattgttttattattttagtagtcatggtcgccagattcacccctcttgaagatgcagctatcagccagtcttggaataatgtctttgtcgccgaaggagaaacaaaaaatatagtttcaggggtcaatttatgggagcttatggttctacatttgacggttaggaacgaaaacccacaccagagaacatctagagttttacaaaacagggtaccaaatattaagagaaaggttaagttgtacctaagttttttggttccagttttgagaaacttaccttctggatggaccatgaacgaatgtgtaagtgttttaaaattcgtaaacattattttaataacacaattttaatatctggttgtataatacaggaggtggagtcgcaccatagatacgaagccgcaaccggtaaagcattccaattatacgaatgttatttactcctaaagcagaggttgcctgaagagtacgatcccgagatattatgccgtgaagatggtgatgaagattagttcggctgcaccaacaatatagattttgtgggtacatctctggcaaaccttccgagactacactcggtcgttagggacaccgaacgatttaaagggctgttgcaccgactaagtgcggtcgtgatgcctgcgacagtgagttaggttgaatttccagtaattttgatttaatgtactatttagtttaagtatccgaataaaatgaacttgtttacacaactttgtcacttacatttacatatttccatctaaatacgacttagcaactccatgtgtacactacaaccaagtcacaaaaattgccaattatacacctaagacaagtggatcaaacggtaataaaaaaaattgtgcgacattaaacctcaggagtgtctatccgtctagcgtaaatagtattggtaaaaaaacactaaaactgtaaatgcgtgtacatggagtgtagacgaaaaaagatcaaggaacgggtatccgttaaccggtctaggaacgacaattcgtagccctttttttttgaggtagaacagttaatgattcaccgttttctgctttttcaaaatggctaatggttagccgtatccggagtcttcccgctaaaattactgcacactaggaaagccttgtgggaagagggatttatggccacggtttttgtgtttgggaagaggttgggcatgcccataaaaaattataaaccgtaggatgttaaattgcccaacaatgtgggactaataatttggatatgtgaaacggcttggattattcacagacccagattaacaaattacagctgtttgatatggcaaaaccaaatctacaaattacagctgtttgatatggcaaaaccaaatctacttatcaagtcccaagaaaaaaattattgcaatctttagcaattccaaagtcactacataactttgcagcttccatttcggtctacccaacaagaatccagattttaatcacacgtgatgtttgtcctactcccaatttagctagacacacggcaatttccatcaagtcggtctcctcttactaacatccctgtggggtgaccaaaaaccaaaagggacactaccttttactaacaccaaggttgatacttgattctactagcctaagccaagttttcatggaaggggttaaagaaattcccgtaatcatatcaggggtgcaaaatgggtttggaaggccatttcatctgacaacctctggcttgtgaaaatgggagcttcatggcaaagacgaaccgttatatgaaaagatagtggggcacgattatggaggactcttatggttttcgacttctgaaaatcaaatagtcagaaattattttatcataattttttagaataacttttacaagcagaaaaatcaatttttgatgaagcagaagtcgaaagtaaatttgtatccaaacatccaaatagcactgtcggttcagtgcacatttcgcaaacaacttgaaacaatagtaaaaaaagtttttactggagaaaatttgagatggccgccttacgtaaggcagaaaacatgacttctggcattgggtcaattgcgtttaaagccatacgtctaagtcagtgtagggttgatgaagtaagtagtggggcaaaaatgataatgttcttattttaattacactactagtacaaaaattatacaacaactactgccaccgtgaaatggatagggtagggataagaagacagatatccctctctcggaggaagaaggcgtgttagcgtgtgtatgtgagaataagaccggactttagtgagatcaaacaagttgactgtcgattaatctactgacatagggtcattaatactgctcgtcaacatgtcatttgtagactcttaatcagaggattacgctctggtttgatttttgtgcgccagcaggacacacttatattcctactaatctgattttaatttcacattaagctctaaaaaactcggataatgctctttgagttacaaatattgcttttaataaacaaaaactatttgattagaaaatggcataaaaatcccatttttatttaaactgtttaaatctagtttttattacctttaaaaaagacaaacatatcatttttatctttattttttcctcttcttctctcctttctgttttcttgtttcttccgcctccttctccccacaaccatcaccaccagcagcaacaatagctccgccaacaacatctccatctccttctctttttctcctcttttttctcaaaatctagagtttgaagtttcgcactcaggatctccttctctttttctcgtctcttttagtttgtctctttgatgccttttattatctggatctttgttgtatatcagcgaaaattatgagaggaaagagaattttgttagggatcgtgttatatgaaagccgatctagatgaaatttgggaatttaagagatttgaaaatgaaatataggtggtttttcgagattaggttgaaatttgggaggattttctatttttaattggttttggtttttgattgagtaagaattaggtcgaaattggggatttctcgtatttgattttttttgaataacgttgaaatttttgggggatttcttgtttctaattgagacattaagtgaaaattaggttgaatttcttgtttctggtttgttttaaattggaatggaattttgggatttgttgttttttaatttggtggttgtaaattagcagatttcttcagaaaattgtgatgataaatcttcatcgtcgaaataaatattgtgttggggaaatgacagatttatgttaaaaccaaaattggtttcatcaaattctgacagttttggttggtgaaaccaaagattttaatgatgaaaattaaatttatgatgaaacctaattttggtttcacctaatttttgcctagtttattcggcctgacttggaagacggcgtttttggtttcatcattgaagttatgttggtgaaatgacaatatgtgggaaaatgatgaaacccaattaggtttcatcgtattttttcattttgttgaatattgatctatatgaaaccaatttttgatggtgagacacaggtggattgttttttgttgaaactagttttagtagaggaggtaatggtggttgtggcgctgatggttgtggcagcgatgggggtggtgcagttgacggtggtggtaggtttcatctattatgttgcattttttattgtttcttccctctcctttcttttatgatgaaaccaaattcacctgatttttcctagtttattcggcctgacttggaagtcggcgtgtttggtttcatcattgaagttgtgttggtgaaatgacaatatgtggaatattgttctatatgaaaccaatttttgatggtgagacacaagtggattgttttttgtcgaaactagttttagttgaggaggtaatggtagtggtggttgtggcggcgatggggatggtgcagacgatggtggtaggttttcatgaaattgtgtttcattttttcttctttcttccttctcatttcttttatgatgaaaccaaattttggtttcatctaatttttggtgaaaccaattttggtttcatcattttttctgtttggtttcattatttatttctcattttttgtggcggtggcggctggttgttggtggtggtggccggcgataacggtggtgttgctcggcggtggtggggcggtggcgcggtggtgattggcggcggcggcggtgatggccgtcgacggtggtggtcggagacgacggtggcgcggtggtgagtggcggtggtcggcggtggtccgtggcggatggtgatcgggggtgttgctagttgttgatggtggattataataaaaattaaaagtggggttgtttttcatttttgttggggtgatttaaactagaaggacagtatagacagtttatgataaatggagtttttgtgaacaaaatattttgttagagtttttgtgaagggatggtgacacctttgatgttgtaacgggcggactattttaattttgattaagcgccccaaacaattattaccaaaactaattaaaatgagtattaaataatgtcataaattctgactcaaacagtccccacaatctttttgaccgcccatatattccctccttcttgctaacttctttactgtctgtctatcaagaacaccaccacccatttcatcaaaaaaaaactttttgattacaaaaaaatctttgtctggaagcagtgaactgtatcttcaaattccaaagtttcaaaccctcgtgagaagaaaattcttataatatgaaacccactactgatttccgttttccacagagaaaagtatagtatcccacgtcactcgtgtgcaaacattattctcactgtctgaaacttctcttcactttcatattcatttgtttttctttatttattcaattccctcttctaaattatatgattctaaatttgtatatataaatagatagaatataggatggttagatatcctgtcagaaccatttgtgtgctacaacagtttggtttatgagcggcagacaaagttgaatcctttttttagctgcaatttgaagaagaaagaagaagaagactctggggtttagaagatttttcaggtaaatatttgattctttgtttgttttcttgttttagaacatgggttttgattaaaaatcttgtttttttttcacacatttggtctggaataagtgagtttccattcaagggttctttacttcttttcttgaatgctctaatttgatgtttttagaaaattttaggatacaatctgaattgaatattaaagttttgatgaaattgacactagtatggatgtgggttttgtgtttgctttgtgaaatcagtatctaagatgtttgtgatatggagattttactcattttcttctattgttcatggattggggtttcattttaatgaatgtttgtgaaattttattacagaacattggaactaagactgggttacttttgattttatggaacaggttgactttttggtcttctttgaagtttggttggttacttgagcttcaatgggtatatcattatctttacttttatcagcctggaaagaaatcattgtgaatagaggtatggttggaattacggataacggcgaagaagttatagttaggactattagtttcaatagaaaagatggtgagatcattgttaggaatgttagttttaagaagaaagataatttggaaagtagtgattcgctgtctgatgggtctgatactaagatggtaatggaggaaccgacgagttttaagaattgggaacggagtaaattgacgctgaagactgtgttttcgttcaagaatccattcattgacaacaacgattcttcatttacttcaagaaacaaagacgaggcttctaagaaagcgaaatccccttcatttcctgaaccagaagttatgtattctccaaggccattgagcgagcttgatgctgcggctgttaagcttcaaaaggtttacaagagttatcgaacccgaagaaatcttgctgattgtgcagttctcgttgaggaactttggttagtcctctattaaccaaccctgcggtgaaatccttggaattgatttgttattagttttcgaaattgtgttgttttgcttacaattcttattgagttttacttttaatgatgtaggtggaaagcactagactctgcagctcttaagctgagctcggaaacattctttaatgtcgagaaacatgaaactgcttcttcccgatggactcgtgcattgactagagctgccaaggtatatactctttacagataacattaatctgcacttggttggaggattaacttgatactaaatcaattgatttgtgcttccaggttggaaaaggtttgtcaaaggatgagaaggcgcaaaaattagcccttcaacactggcttgaagctgtaagttcttaaaccttcatcaatgtttaccaatttactgaaacatatctcttgagttgcgtaactctgatgatttggttgatcttgacttggaccagctcatttttgtggatgttgacaaaaatagtacttggtcactcaagttcttggagatttgacatttgaattgaaatagttttgcttacttccggtttaattgtgcagattgacccacgacatcgttacggtcataacttgcatttctattatgatctgtggtttgattgcgggagttcccaacctttcttctactggtaaataatatacactagaacattttacacttgcaattgtgattatcttacttattggcggtgcacaagcttttccagttttcttatatttcaatacttgtttgttatgtaaaggttggatgttggagatggcaaagaagtaaatcttgaaaggtgtcctaggagcacacttcaacgtcagtgcatcgaatatcttggaccagtaagtcttcactgccatgtacctggagacttggttgtttaggacgcacctgatcatacacttgaggagttcaactgcttaactcacatttccatttgttttgatctttcagaaagagagggaagtctacgaagtaatcgtggaagatggaaagcttgtctacaaacaaggcggagagtgtgtggacactgttgaaggcttcaaatggatttttgtcctaagcacatcgagatcattgtatgttgggaagaagaaaaagggtcagtttcaacactcgagttttctatctggcggggctacaacagcggctggaagattagtggcccatgatggggttcttgaggtatacacagtggttgcatcctaggatttgtacaacttatttataatgttgtcctgagtgattctaaaaatctcactttctgtaggcaatttggccatacagcggccactacctccccaccgaagagaatttcaaagaattcgtcagcttcctcgaggaacatcatgtggatctcaccaatgttaaggtaacactctttgcccagtccccaacaccccaactgattcgctcgaagctaattctaatctccctttcgaaccatatgaacactttgtatagctaataaacatgaatcaaatggctgacattattcattttatgtctttccagagatgtgcaaatgatgaagactgtccatcatcattcaaagttaccgacagtgaagtggatagtaaggcagaagatacagagggttcatcattcaaactcactgatgcacccccagcagttgatactactagtattcctaaagaagagaccaacggcaatgcgcaaccacagaagttcgatttagccaagcgtttatcttgcaaatggagtacaggaaccggacctcgtattggatgtgtcagtgactatccaaccgagctacgattccgtgcactcgaacacgtcaatctatcgccaagagttaggaccggaagtgttgggtactcgggaccaatcccttcaccgcgacctagtccaaagattcgactttctccaagacttgcttacatgggtctgcctagtcctagaagctctatacccagtagaacaacttcctgttaagctgattgcaaattgcaataactaactagggtcgtcttttttactggctcaacttgtgccccttcatcaataggctcaataaattttaatgtgtgggatatggaaaaaaaaaatgaaaataatttgttcatcttttttccattttctcccatttttgtaattcaacaaaattaaattcaatcaaattcttttgtttttttttacctcctgtttttgaatttgaactatctgcattcaatttcgccgttggagtattttaaggtttctgttgtattccctccatttctaaaaaataggcttgtttccttatttggatatgtcaaaaaaataggcttgtttggaaagtcaaatgttaggattttactagtatatctattgagggaccacttctcttttttcattttctctgttaatattaaagggggaccacttctctcaatctctcttgtaacaaaagaatggggaccaaggataaattacgaaaaaaacataaaaaagtggctacaatgattgattttcttaatttttgtgaaaatcaaacaaaccaattttttgttgaaacggagggagtggaataaaaggaagccggcaaaattatattctgaacttcatatggtgtgctggttgggttaactggagattaacatgtgatggctgtttttgttcaaggcggaggaattcttgtgtcgaccaatgtgctttgaccaagaataaatcaaaacaaatatgggctcccgttattgaaagaattgatcaccaactttcgaattggaaaatgaaatctttgtccaaagaaaaaagattaatttagggtgtttggaaagttgtttttcgacttctgaaattcggaaaatcaaaaatcagtttggtaataatttttcagaacaacttctagaaacagaaaagttagttttttgtgaagcaaaatgttttgcttctgacttctgctttcggtatacaaacgcgttattagcgctaaaaatatctaacttatttttttgtccatttttttgggaaattggaaattgaagtgatttagtataatgttatttgtataccaaacacaagatcctaaaatttaaacaatatttgttaaaagtattttttttaagaaggcacaattggagaatacttttactaattgggagatataaattaatattctcatctaatagtttctgctaaggggtgttttttgggggtggaaatacgaaattattctttcaaaaaataaaaactaaatgaaacctaaatattctcccctctctttcaaattctaaatattcatcactccctttcaaattctcttctccttctctgccggctcctcactttgaaatgatttattctttttacattcggaggtgatgaagactatgccggaaatgatgaagaccatgtaggaaatgattttttttttacatcgccggtattgtattactgattaagaccatgccgaaattaatgaagaccatgccgaaaaatgatgtcgtgctcgataaataacttacaatgccgacattgtaagttggaagtacccattttttggcattaattttttcggcattttgtaagttgagagtactcattttttaagaagggttcattaggggatacttttttttagttgggggataagtactggcatggttttccaatgatgtcggcatggtcgatggattgtcggcattgaaaaaccatgccggaagctacagtaaaatatctcccaattaaaaagagcgtcccccgattaattgttcttttttaaccacatttctattacctcaaaaaatttccttatactctcacccaagtgacgtgattatggtttatactaatcattatcaattaatcttttaacttagctaattataattaaccactaaacatgattagtgagacgtagattatgaattatttaaaatacatggataaggggtgactctgatttactatttaaatttcatttttgtctttttcttatatcccccaagtagtaaaagtatcctccaattgcgcataaaaaacctaagaaaggagggaattttttggaattttttcatttgagatttgaagttctataagatttgaaactctaagttgagtaagcaaaatgaatcgactatatagaacttatgaagttctctggcctattcctatgtacaaggttaaaaaaaattgtttgacatacgaggtggcatggcagatgagttgcgctactatgcgaaaatcactgagtgatagagtttatagcgaatgaaataaatcatatagccaacgatggagtctttatcgctagtgctaccaaggatatcgctcggtattcagtctagcaccgatgactagtttcttgtcgcctataaataggtaattttcaaactaaatatttacaccaaatttttctttatttctctctttctaatttttttttcttcaaattttcccaagtggcacaatttcaaacccaacttgattcgccaacacaacttttttttttgaagtagtgcttgaaggtgttgttaagaaaatatgtgatagttgtaaaaaaataggtaaaaacaaagaagtcttcaagttttggatattaaccaagtcaaacctgcaaccaagaaaaggcaaacaaaagttcgaggcaaggaaaatcaaggcgaaacaattttgaagataaataagaagataaacaaaggaaaccccattcatgaacgcattgattggaagttctgtgaaacgaagaagataaacaagatgaagaacattatcccagatttttatttttaaagtatatatttcaaattattattgtctagttttatatcttataaatgaaaattaatgattatttcgaagtttaatgaatttgaaaatttgactcgtattgttgaaaattaagcttaattttatttttaattcagtctcacactttaaatagagttatattttaatttaaactaaagtaagaaaaatattaaaacttaatactaagacttaagttgacaattaataagctaaaacataaatattggattatatttgggccaccctcttaaaatcttgaaacaacttacaaattgaaagtcttttcagttgatgcgataatactcagcacgacacctttgttcaaggtctatcatggtttcaccatccctcgtgttttgacccttttgctgaagtaaaacaacatactacttaataatttcctcattcattacagtgaagcgatgacacaatcttgaaacatcacgattgttggggttcattgtttgctcttgaagttttccaaatatcctttcccaaaatatttggggatggaaagcatatgcgaagacacaactctcagtaaaaaaaaaaataattcctgcaaatacattcatcttcctcggtagtaaatattggtaattgcctcccaattcgactttggacattggctcgattactagctctttgattttatgcagcatgttggttttctatgaactcagccatgctcattgaagaattggaagaataatgaaaagtattggaaatttataaattctggtgtgagttgaaatgagtttgaacttaagtatttataaaagggggaaattatagccgttggatgaggaactgctgagcgataatctactcagttagcgacaacatgactatcgttggcgctgtacagaacaacaagcgattgtatgaccatatagcgatggacattctatcactcggtagacagtctatcgtttatgcctaagtggtatatttaccacttagccacttatgttgctactttaccatacccacagtgggcgcaaaagtgacaaaccaattgaaataccatatgcgtaggaatatgcctcataatcacttgcgtgtattaatctttatccccttaaaagatattttttaaagaaatacttataaataaatagattgtatttccgtaccatcattttttttccgatataaggatcaagaaaactatatgaagaatttaaaaaaaaacttaattaggaaaacttaaatacagttcagaactagctagaggtattcttccaaatgtgtccggttgctagccaccttaactcaagaaggaaaagttgacaaaaatagattattgtcatgctttagaaacactaggttgtggaacctaagtcttgatttacaataggtttaggtttcaaaacctacttgtttaggtttcagaaccgagaggataaagtgtgcagaactttgtaagagaatcttgtttgattttggaatcacactgaattgtgcaaagtgaaaatacgtgtaagtttgttccttcatcatgttgacttctccaatgatgaatgattattttatgtgatttcttagactcaattctcctcggatgtatacacataaggtatacttaccgtcatagttattggtctgatagattgatagatggatagataattagatagaaagaaagtaaaagactgataacgagattcagtgtacatgttactaatctttattgaatacatacgtctttattagatatcttcatgttctcttctatcttcgttcttcattcctcaagggtaaatcagagtaattttcgatatggttcttccacctagctctttcttacggactttggttgtaaattactcaaaaatagattattatcgaaacatgacagtacatactaaacatattaatgcctacgggttcaaccgagtgatgccctgataaaggcatgtttgtatcttccaccgcctcgagctaaccaacctgtctaaaactgcttaagtttggaggaaaaaaaaagatcatggcaaccataagatgaatactttagcgattcatcaagctcttcttcaaatggaaagtaaattatgtttattataaattcctttaaaccagcattaagtatatcacaaattcttgattcttcatattagaaatcccttgtttttcattcaaataaaatggaagtgcccccttccataggtcaaccaatattcttaacctaatctccaacaccaaattttattctagtacgtaaggaactcaaatctaatagtactattgttcgtgtacaaataatatataacatctttagtttttttgacatcttgaaatcaaaggcatatgaagataactaaaatcaaaatattaacatacatacctattttgaataatttaagaaaattatattattcttgtggagatggggaatccgtttccaaatcttgattggagattcttgtggaagcttaagtgaccacataaaattaggttttgcttatgcctattgtgtcatgataaacttagcttaaatgagagtttatataggaaacgaatgtgtgctctatcctggatgtagtttatgaaaaagagggggtctaacaaccacacccaatatttcgcttagcaatctgtatggactaactccaatatactttcaagagaatcaactagacagtcagaattgatcttaagaaaagtatgtcaaagagttatatctcaatttctcaattcaatctgcaatcaaacatataggaatttgtgagcccgatttaatataagaaataacttggatggtatcaaaaaccaatatccaagtgtcaataaatttaatcaacaaccaaaggttgaattcacaattgattgaacttacgcacaacttatgatatttcaattatatagaaaatataatgcggaaaagaaataacacagacaccagaagttttgttaacgaggaaaccacaaatgtagaaaaactcagggacctagtctagatttaaacatcacactgtattaagccgccacagacactagcctactccaagttaactttggactggtatgtagtttagcaacactgatcaaggtacagttgcactccttacgtctctgaatcccagcaggactctacgcacttgattcccttagatgatctcacccacaactaagatttgctacgacccaaagtcgaagacttgataaaccaatctgtcttacccaaatcaagtctattgaatagataaatctgtctcccacagatatacctatgagttttgttccgttttttgataaatcaaggtgaacaggaaccaattgatataccaaacttatattctcgaagaacagcctagaaatatcaatcacctcacaataatcttaatcgtatggtagtgaaacaagatattgtggaatcacaaacgatgagacgaagatgtttgtgactaatttttatcttgcctatcggagattaaatctcgagcaaatcttagagaagatagtactcaatcacgatagaaaacagctagatcagaacagcaactacagagaaaatagttgggtctggcttcataatcccaatgaagtcttcaagtcgttaacctacagggttttagaaaaacctaaggtcaaatgagaatcgactctagtcgcaactagtatcacacatgatatgtggggattaggtttcccagctgctagagttctcctttatatagccttcaaataagggtttgcaatcaatgttaccttggtaacaaagcattcaatattcaccgttaaatgaaaacctgattagactcaagctaatatctttcagccgttagatagaacttagcttgttacacacaagtgaaaagtgactcatttagatatgagtaaccgtacctaaacgtgtgcacctttgttggctcaacaatagttaaccgaaattatccatatgaacactttcatgtcaaccttattcatcttaaccataactggttcaaatgactcaaatgaaactagttctagagtttttcaattgtttatattctcataaaagtatacatgacacaattgaagcaaaatcgatttttattcactcgaatcaattcatgaacattatagccacagtttgcaaaagattgcattccttattatataaacatactagaactcactcgtgtcgtaacggcacgacctccgtagtaggtaaaaaaaattatgttaattttaatctttgtcattttcttttgttgcctctatataaaatgacaattattctccatgttttttaattgttatgttttctttctgagaatttctaggttgaccaaaatatttttctcgaaaaattcaccgggcgaaacatgtagtgagaccaattgaaaacctgtactatccctatcgtcgctgggttttttagaggttgtttctcggaaaaaattgtggtcagcctgtacatttgtttttttttgtattagtaaccatcttattttcacattaaaaaaatcaaccacaacttccccaataaatattacttatgtcttaacaacatataataaacattgccactaacacactgagcacctgcactaccatcactggaaccactcatcaccactaccttttctaccaccaacaatatcgacactggctccatgcatcatgataaacacgtaaatattatattttatactcatatttatattagctagaactcgatattcaggctaataacattgttttaagttgtttccaggaattacaaacaaatccaaaacggtgcaataaaatgacgaaatgggagctaaattgacggttacgagtgtggtgcttaatcacgggaagcaaagttggccagttaattcagtaacacaccatcaatatatgtcatcgtctcaagccggtagcagtccaacaatatcacagccgagatggaaatttattctgtgattggacgtgcataaaccgaaagaaatcaattatgtcgtcactttgatagtccatgcaaagttacctctaattgctcgcaccaaatgataaggaaagtcaaaggcatgcatgcatagaaggacaaaaaggagctggcatatatggtacaaggaaactaatgaagataccatattcagtctttccaaaacaaggtgatactcatatatatttattttaaggaagttgaaaaggtacttaccttttacttgtgagagtaataacatagtggatgaaaattaaggaagtgggtcccgcgtatataaagatttggctcattttgacgacactagattggaaagtcagtgttaaacttggaatatcaatataaaagaaagtgcattacgacgagagagggggttctcggttgggtctgttcgaggagatacaacaagatagggagacgatcatttaccgggtgacaacggtgatatcggtttattatttctttttcttgtaatttatttttatgggttttgagaaatccatttctatggtgtgctagattttgtaactagggttcatggagaaaactactttgagcatagaccattgtgaaataaattggaattattttggtattatgctataaaaatgaatcttgaagtctataattttgtttattgtttttattataatatgagttgttgcacaccggctttgtatgatacattagcctaaattcataaattcatgtagtttgcaattatatttgttagtatttgataattcatgcttaggttaatcttttaattggttatgcttagacgaagcaaataataattgtgaatctataaattatgttttcgataattctctcgttataataatttgctaggtcatgcttagaaatttgatgggctatacttaggagatgcgagtttatgatcggagattatatcaataataggtggtgcaatagaacaaatctataaacacatatttggaattcgagttcttttcggtgcataattataaatagtagtggaatccgtagaccctgtttaccgactctctttctcattgtatttaattagttttcttttgttttcattatttttaaattcttaattccaagaatccaaaaatatcatatcttgattggttagtcgattaggagtattgattgcagtatttccaccgctccctgtgggttcgacccgtacttgcctctgtctactagttagacaccgtgcgattgcagttatcatatatagggttcttccagaatcccatcacatcaccactcaaaaagaccaccccgatcatctatagtgatccaccaccctcgccttccatcaaaaccattattaatgtccactgattcaatataatataaatttatcatgtactatattaatgaaagtattattttaaatttaaaaaataaaaaagaaagaaaaacaaatttaaaaactaatatcaaataaaaaaataaaccaacgtaacttagtaatttatctaccttattaggacacatttctcatcccactacaactacttcttccagcgccactaccgttaacgtcatcactcctccattttcacatccaacacccaatacgattatccccaccgctgatccaccactcccgcccaccatcacaaccaatattaatgtccactgatttaatataatataaatttattatgtactatattaacgaaagtattattttaaaataaaaataaaaaaagtaatatcaagcaaaaaaatgaatcaagggtaactaagtaatttatctaccttaggacacctttctcatcctattaccactacttcttccaccaccaccaccaccactattaacgtcatcactccaccaatatcaccaacacccaccaccattatccccaccgttgatccaccacccccacccatcatcacaaccaccattaatgtctactaatttaatataagataaatttattatgcactgtgttaatgaaaacatatttatttgattaattaaacaaacatttattataaaatactaatagaacatttattgttgaaatgtaattaaactgatcattttacaaccgtagatttagctttctttaccactacttcttccagcaccaccaccgttaacgtcattgctcctccattctcacatatccaacacccaccaccattatccccatcggtgatccaccacctcctaccacaatattaatgtccactgattcaatataatataaatttattatgtattgtattaacgaaagtattattttaaatttaaaaaaaattaatatcagataaaaaaattaatcaagggtaactaagtaatttatctactttaggaaatctttctgatcccactaccactacttcttccaccaccaccaacaccattaacgtcatcactccaccattctcaccagcacccaccaccattatccccactgttgatccaccacctccacacaccattaatgtctattgatttaatataaaacaaatttattatgtactgcattaacgaaagcatatttatttgattaattaaacaaacatttattattgaaatttaattaaactgatcattttacagttgtagatttagctttccctaggagaaatttggaccactctttaacttgcctaagttttccaaactatgctttataagggaaattagttcatgaacaaactgattttagaacataagccactcaagtatgcaaacaggtacgcatacctaagtgcacggactaagtttgggttcgccagtacgcgaacgggtacgcataccaccaaactcagtaaggtcccggaacttgaatctcacgccagtacacgtaccgatatgcgtacttagttcccggacctctactaaaccaatcagtacgcatacgggtatgcataccatggttcccggacttggaataacttgcaacagttagcatacaggtatgcgtactttgctatatccaatcatggttatttgttgtaaacttccatttcaatcattgaaacattctcgaaagacgacaatagctgcctcacacaaactggtagtttcaaaacaattttcaagtgatcgaatgatcaatacgaaacattccgagtctacatcaaatgattgtctcacacaaatcatgtaagatgttaccaggtgattttcacatgatcatattttgacttttgtcaagaatatatgatgaacttggttaaagcgaaatcttaccaacacatatttcgagaaatatgtaagcgagttaaactcaactcaaaatatcaaatgtgtataatcgaagtctatatagctatatgacttttgtctcaaataggagatcgagtagatagacttttgagtgatagatgctttcaagtctccacataccttttgttgatgaagttatacaagctcctcttagtagttgttcgtctttgattgatgaacgccgtgaagtctaaagctcaactacactttctatcataatctgagacttagctataagtagactagaaatcaagacttatagttttggcaactaaacttgacaacaagcttgagatagcaacggttgcgagttcgaccgagcagcgctctaacagtttatgtaatcaggattttgaaacttcttatcatatgttttttggttgtcgtgcagttgaaccagtgttgagaaagatcagagactggattgctttcaaacctaatacagtaaaacctccatatattaattcatatggggattcataaatttattaatatatggaggttattaatatatggggtatacctagaaatgttaaatatttctagttcaatgtatgtaaacctattagataatgtaatacatctttatagttccaatacatgggtacatttatgtatctaagaacttgtaaggctatcatgaattttttgatgttttctacaattgtagatagtactactatctttgaagataattcatcaatctataacaacccaaaaattatggtaacaacccaaaattatctattcttctcaacaattatagataaatattttatatcatcatgaatttcaatgtaataagatctatatttctaatatagtgtcaattattaatatatggaggtaaatttctcaaggagggactagaaaaaacagtaatatcaaaatgtggaggttatcactatttataatcggcccaagttggaaccataattttttattgatatatggagattattaatatatggagtatcaatatacataggttttaccgtatatgttcttatgtctctatatgtgcttaccagtggttgtagttacaagggtgagattggtggcgttgagtgggaatctgttttcccatttgtgctttggcatatttggaaaggaaagaaatgattggatctttaacaaggttaaatttcatgctacaagagttctggaaagggatttaagagacactaaagagtatgttagtgcttgcaaaatgatggagaaagttcaacaaagggtggagaatatgccagttccgtgggtttatcctaaacaagaatattccaaacttaactgtgatgacgcgtttaacaattgtaaagatgctggtatcggaggagtgatacgtggggataatggtgtctttcaagtttgttttgcaaaaaatttatacaaaacaatagtaatgtggcagaagctt

SEQ ID NO: 37 - DNA, 1173 bp, Papaver somniferum
cggtcgtcagactgtcgatgaagccctgaaagacgcgcagactggatccatggaaaccccaatcctgatcaaacttggcaacgggctctcgatccctagcgtccaagagctcgccaagttgaccctggccgagatcccaagtcggtatacatgcacaggtgagagcccacttaacaacatcggtgcgtcagtaacagacgatgaaacggtgccggtcattgatttgcaaaacttattaagtccagagccagtagtggggaaattagagttggacaagttacactccgcttgcaaagagtggggcttctttcagcttgtcaaccatggcgttgatgccttgttaatggacaacattaagagcgaaatcaagggcttttttaacctgccgatgaatgagaagaccaaatacggtcagcaggacggcgactttgaagggttcggtcagccttatattgaatctgaggatcagcgcttggattggactgaggtgttctcaatgctctcgctgccacttcacctgcgcaagccgcacctttttccagaacttccacttccgtttcgcgagaccctggagtcgtacttgagcaagatgaaaaaactgtcaacggtggtgtttgagatgttagaaaagagtttgcaacttgttgagattaaaggtatgactgacttgttcgaagacgggctccaaacgatgcgcatgaattactatcctccatgtccacggcctgagttggtattgggtcttacaagtcatagtgacttttctgggttgaccattttactccagttaaacgaagtggaggggttgcagattcggaaggaagagcggtggatcagcatcaaaccgcttccagacgcctttattgtcaacgtaggtgatattctcgaaattatgaccaacgggatctatcgtagtgttgagcaccgtgcagtcgtgaatagtaccaaggagcggctttccatcgccacattccatgactctaaattggaatccgaaatcggtcctatctcttcgttggttactcctgagacccctgcattattcaagcgcgggcgctacgaagacattctcaaggaaaacctttcgcgcaaacttgatggcaagtctttcctggattacatgcgtatgtgactcgagcaccaccaccaccaccactgagatccggctgctaa

SEQ ID NO: 38 - DNA, 1173 bp, Papaver somniferum
cggtcgtcagactgtcgatgaagccctgaaagacgcgcagactggatccatggaaaaagcaaaactgatgaaacttggcaacgggctctcgatccctagcgtccaagagctcgccaagttgaccctggccgagatcccaagtcggtatacatgcacaggtgagagcccacttaacaacatcggtgcgtcagtaacagacgatgaaacggtgccggtcattgatttgcaaaacttattaagtccagagccagtagtggggaaattagagttggacaagttacactccgcttgcaaagagtggggcttctttcagcttgtcaaccatggcgttgatgccttgttaatggacaacattaagagcgaaatcaagggcttttttaacctgccgatgaatgagaagaccaaatacggtcagcaggacggcgactttgaagggttcggtcagccttatattgaatctgaggatcagcgcttggattggactgaggtgttctcaatgctctcgctgccacttcacctgcgcaagccgcacctttttccagaacttccacttccgtttcgcgagaccctggagtcgtacttgagcaagatgaaaaaactgtcaacggtggtgtttgagatgttagaaaagagtttgcaacttgttgagattaaaggtatgactgacttgttcgaagacgggctccaaacgatgcgcatgaattactatcctccatgtccacggcctgagttggtattgggtcttacaagtcatagtgacttttctgggttgaccattttactccagttaaacgaagtggaggggttgcagattcggaaggaagagcggtggatcagcatcaaaccgcttccagacgcctttattgtcaacgtaggtgatattctcgaaattatgaccaacgggatctatcgtagtgttgagcaccgtgcagtcgtgaatagtaccaaggagcggctttccatcgccacattccatgactctaaattggaatccgaaatcggtcctatctcttcgttggttactcctgagacccctgcattattcaagcgcgggcgctacgaagacattctcaaggaaaacctttcgcgcaaacttgatggcaagtctttcctggattacatgcgcatgtgactcgagcaccaccaccaccaccactgagatccggctgctaa

SEQ ID NO: 39 - DNA, 1173 bp, Papaver somniferum
cggtcgtcagactgtcgatgaagccctgaaagacgcgcagactggatccatggagaccccaatcttgatcaaacttggcaacgggctctcgatccctagcgtccaagagctcgccaagttgaccctggccgagatcccaagtcggtatacatgcacaggtgagagcccacttaacaacatcggtgcgtcagtaacagacgatgaaacggtgccggtcattgatttgcaaaacttattaagtccagagccagtagtggggaaattagagttggacaagttacactccgcttgcaaagagtggggcttctttcagcttgtcaaccatggcgttgatgccttgttaatggacaacattaagagcgaaatcaagggcttttttaacctgccgatgaatgagaagaccaaatacggtcagcaggacggcgactttgaagggttcggtcagccttatattgaatctgaggatcagcgcttggattggactgaggtgttctcaatgctctcgctgccacttcacctgcgcaagccgcacctttttccagaacttccacttccgtttcgcgagaccctggagtcgtacttgagcaagatgaaaaaactgtcaacggtggtgtttgagatgttagaaaagagtttgcaacttgttgagattaaaggtatgactgacttgttcgaagacgggctccaaacgatgcgcatgaattactatcctccatgtccacggcctgagttggtattgggtcttacaagtcatagtgacttttctgggttgaccattttactccagttaaacgaagtggaggggttgcagattcggaaggaagagcggtggatcagcatcaaaccgcttccagacgcctttattgtcaacgtaggtgatattctcgaaattatgaccaacgggatctatcgtagtgttgagcaccgtgcagtcgtgaatagtaccaaggagcggctttccatcgccacattccatgactctaaattggaatccgaaatcggtcctatctcttcgttggttactcctgagacccctgcattattcaagcgcgggcgctacgaagacattctcaaggaaaacctttcgcgcaaacttgatggcaagtctttcctggattctatgcgtatctgactcgagcaccaccaccaccaccactgagatccggctgctaa

SEQ ID NO: 40 - DNA, 1173 bp, Papaver somniferum
cggtcgtcagactgtcgatgaagccctgaaagacgcgcagactggatccatggaaaaagcaaaactgatgaaacttggcaacgggctctcgatccctagcgtccaagagctcgccaagttgaccctggccgagatcccaagtcggtatacatgcacaggtgagagcccacttaacaacatcggtgcgtcagtaacagacgatgaaacggtgccggtcattgatttgcaaaacttattaagtccagagccagtagtggggaaattagagttggacaagttacactccgcttgcaaagagtggggcttctttcagcttgtcaaccatggcgttgatgccttgttaatggacaacattaagagcgaaatcaagggcttttttaacctgccgatgaatgagaagaccaaatacggtcagcaggacggcgactttgaagggttcggtcagccttatattgaatctgaggatcagcgcttggattggactgaggtgttctcaatgctctcgctgccacttcacctgcgcaagccgcacctttttccagaacttccacttccgtttcgcgagaccctggagtcgtacttgagcaagatgaaaaaactgtcaacggtggtgtttgagatgttagaaaagagtttgcaacttgttgagattaaaggtatgactgacttgttcgaagacgggctccaaacgatgcgcatgaattactatcctccatgtccacggcctgagttggtattgggtcttacaagtcatagtgacttttctgggttgaccattttactccagttaaacgaagtggaggggttgcagattcggaaggaagagcggtggatcagcatcaaaccgcttccagacgcctttattgtcaacgtaggtgatattctcgaaattatgaccaacgggatctatcgtagtgttgagcaccgtgcagtcgtgaatagtaccaaggagcggctttccatcgccacattccatgactctaaattggaatccgaaatcggtcctatctcttcgttggttactcctgagacccctgcattattcaagcgcgggcgctacgaagacattctcaaggaaaacctttcgcgcaaacttgatggcaagtctttcctggattctatgcgtatctgactcgagcaccaccaccaccaccactgagatccggctgctaa

SEQ ID NO: 41 - DNA, 1173 bp, Papaver somniferum
cggtcgtcagactgtcgatgaagccctgaaagacgcgcagactggatccatggaaaaaccaatcctgatcaaacttggcaacgggctctcgatccctagcgtccaagagctcgccaagttgaccctggccgagatcccaagtcggtatacatgcacaggtgagagcccacttaacaacatcggtgcgtcagtaacagacgatgaaacggtgccggtcattgatttgcaaaacttattaagtccagagccagtagtggggaaattagagttggacaagttacactccgcttgcaaagagtggggcttctttcagcttgtcaaccatggcgttgatgccttgttaatggacaacattaagagcgaaatcaagggcttttttaacctgccgatgaatgagaagaccaaatacggtcagcaggacggcgactttgaagggttcggtcagccttatattgaatctgaggatcagcgcttggattggactgaggtgttctcaatgctctcgctgccacttcacctgcgcaagccgcacctttttccagaacttccacttccgtttcgcgagaccctggagtcgtacttgagcaagatgaaaaaactgtcaacggtggtgtttgagatgttagaaaagagtttgcaacttgttgagattaaaggtatgactgacttgttcgaagacgggctccaaacgatgcgcatgaattactatcctccatgtccacggcctgagttggtattgggtcttacaagtcatagtgacttttctgggttgaccattttactccagttaaacgaagtggaggggttgcagattcggaaggaagagcggtggatcagcatcaaaccgcttccagacgcctttattgtcaacgtaggtgatattctcgaaattatgaccaacgggatctatcgtagtgttgagcaccgtgcagtcgtgaatagtaccaaggagcggctttccatcgccacattccatgactctaaattggaatccgaaatcggtcctatctcttcgttggttactcctgagacccctgcattattcaagcgcgggcgctacgaagacattctcaaggaaaacctttcgcgcaaacttgatggcaagtctttcctggattacatgcgtatgtgactcgagcaccaccaccaccaccactgagatccggctgctaa

SEQ ID NO: 42 - DNA, 1173 bp, Papaver somniferum
cggtcgtcagactgtcgatgaagccctgaaagacgcgcagactggatccatggaaaccgcaatcctgatcaaacttggcaacgggctctcgatccctagcgtccaagagctcgccaagttgaccctggccgagatcccaagtcggtatacatgcacaggtgagagcccacttaacaacatcggtgcgtcagtaacagacgatgaaacggtgccggtcattgatttgcaaaacttattaagtccagagccagtagtggggaaattagagttggacaagttacactccgcttgcaaagagtggggcttctttcagcttgtcaaccatggcgttgatgccttgttaatggacaacattaagagcgaaatcaagggcttttttaacctgccgatgaatgagaagaccaaatacggtcagcaggacggcgactttgaagggttcggtcagccttatattgaatctgaggatcagcgcttggattggactgaggtgttctcaatgctctcgctgccacttcacctgcgcaagccgcacctttttccagaacttccacttccgtttcgcgagaccctggagtcgtacttgagcaagatgaaaaaactgtcaacggtggtgtttgagatgttagaaaagagtttgcaacttgttgagattaaaggtatgactgacttgttcgaagacgggctccaaacgatgcgcatgaattactatcctccatgtccacggcctgagttggtattgggtcttacaagtcatagtgacttttctgggttgaccattttactccagttaaacgaagtggaggggttgcagattcggaaggaagagcggtggatcagcatcaaaccgcttccagacgcctttattgtcaacgtaggtgatattctcgaaattatgaccaacgggatctatcgtagtgttgagcaccgtgcagtcgtgaatagtaccaaggagcggctttccatcgccacattccatgactctaaattggaatccgaaatcggtcctatctcttcgttggttactcctgagacccctgcattattcaagcgcgggcgctacgaagacattctcaaggaaaacctttcgcgcaaacttgatggcaagtctttcctggattacatgcgtatgtgactcgagcaccaccaccaccaccactgagatccggctgctaa

SEQ ID NO: 43 - DNA, 1173 bp, Papaver somniferum
cggtcgtcagactgtcgatgaagccctgaaagacgcgcagactggatccatggaaaccccaaaactgatcaaacttggcaacgggctctcgatccctagcgtccaagagctcgccaagttgaccctggccgagatcccaagtcggtatacatgcacaggtgagagcccacttaacaacatcggtgcgtcagtaacagacgatgaaacggtgccggtcattgatttgcaaaacttattaagtccagagccagtagtggggaaattagagttggacaagttacactccgcttgcaaagagtggggcttctttcagcttgtcaaccatggcgttgatgccttgttaatggacaacattaagagcgaaatcaagggcttttttaacctgccgatgaatgagaagaccaaatacggtcagcaggacggcgactttgaagggttcggtcagccttatattgaatctgaggatcagcgcttggattggactgaggtgttctcaatgctctcgctgccacttcacctgcgcaagccgcacctttttccagaacttccacttccgtttcgcgagaccctggagtcgtacttgagcaagatgaaaaaactgtcaacggtggtgtttgagatgttagaaaagagtttgcaacttgttgagattaaaggtatgactgacttgttcgaagacgggctccaaacgatgcgcatgaattactatcctccatgtccacggcctgagttggtattgggtcttacaagtcatagtgacttttctgggttgaccattttactccagttaaacgaagtggaggggttgcagattcggaaggaagagcggtggatcagcatcaaaccgcttccagacgcctttattgtcaacgtaggtgatattctcgaaattatgaccaacgggatctatcgtagtgttgagcaccgtgcagtcgtgaatagtaccaaggagcggctttccatcgccacattccatgactctaaattggaatccgaaatcggtcctatctcttcgttggttactcctgagacccctgcattattcaagcgcgggcgctacgaagacattctcaaggaaaacctttcgcgcaaacttgatggcaagtctttcctggattacatgcgtatgtgactcgagcaccaccaccaccaccactgagatccggctgctaa

SEQ ID NO: 44 - DNA, 1173 bp, Papaver somniferum
cggtcgtcagactgtcgatgaagccctgaaagacgcgcagactggatccatggaaaccccaatcctgatgaaacttggcaacgggctctcgatccctagcgtccaagagctcgccaagttgaccctggccgagatcccaagtcggtatacatgcacaggtgagagcccacttaacaacatcggtgcgtcagtaacagacgatgaaacggtgccggtcattgatttgcaaaacttattaagtccagagccagtagtggggaaattagagttggacaagttacactccgcttgcaaagagtggggcttctttcagcttgtcaaccatggcgttgatgccttgttaatggacaacattaagagcgaaatcaagggcttttttaacctgccgatgaatgagaagaccaaatacggtcagcaggacggcgactttgaagggttcggtcagccttatattgaatctgaggatcagcgcttggattggactgaggtgttctcaatgctctcgctgccacttcacctgcgcaagccgcacctttttccagaacttccacttccgtttcgcgagaccctggagtcgtacttgagcaagatgaaaaaactgtcaacggtggtgtttgagatgttagaaaagagtttgcaacttgttgagattaaaggtatgactgacttgttcgaagacgggctccaaacgatgcgcatgaattactatcctccatgtccacggcctgagttggtattgggtcttacaagtcatagtgacttttctgggttgaccattttactccagttaaacgaagtggaggggttgcagattcggaaggaagagcggtggatcagcatcaaaccgcttccagacgcctttattgtcaacgtaggtgatattctcgaaattatgaccaacgggatctatcgtagtgttgagcaccgtgcagtcgtgaatagtaccaaggagcggctttccatcgccacattccatgactctaaattggaatccgaaatcggtcctatctcttcgttggttactcctgagacccctgcattattcaagcgcgggcgctacgaagacattctcaaggaaaacctttcgcgcaaacttgatggcaagtctttcctggattacatgcgtatgtgactcgagcaccaccaccaccaccactgagatccggctgctaa

SEQ ID NO: 45 - DNA, 1173 bp, Papaver somniferum
cggtcgtcagactgtcgatgaagccctgaaagacgcgcagactggatccatggaaaccccaatcctgatcaaacttggcaacgggctctcgatccctagcgtccaagagctcgccaagttgaccctggccgagatcccaagtcggtatacatgcacaggtgagagcccacttaacaacatcggtgcgtcagtaacagacgatgaaacggtgccggtcattgatttgcaaaacttattaagtccagagccagtagtggggaaattagagttggacaagttacactccgcttgcaaagagtggggcttctttcagcttgtcaaccatggcgttgatgccttgttaatggacaacattaagagcgaaatcaagggcttttttaacctgccgatgaatgagaagaccaaatacggtcagcaggacggcgactttgaagggttcggtcagccttatattgaatctgaggatcagcgcttggattggactgaggtgttctcaatgctctcgctgccacttcacctgcgcaagccgcacctttttccagaacttccacttccgtttcgcgagaccctggagtcgtacttgagcaagatgaaaaaactgtcaacggtggtgtttgagatgttagaaaagagtttgcaacttgttgagattaaaggtatgactgacttgttcgaagacgggctccaaacgatgcgcatgaattactatcctccatgtccacggcctgagttggtattgggtcttacaagtcatagtgacttttctgggttgaccattttactccagttaaacgaagtggaggggttgcagattcggaaggaagagcggtggatcagcatcaaaccgcttccagacgcctttattgtcaacgtaggtgatattctcgaaattatgaccaacgggatctatcgtagtgttgagcaccgtgcagtcgtgaatagtaccaaggagcggctttccatcgccacattccatgactctaaattggaatccgaaatcggtcctatctcttcgttggttactcctgagacccctgcattattcaagcgcgggcgctacgaagacattctcaaggaaaacctttcgcgcaaacttgatggcaagtctttcctggattctatgcgtatgtgactcgagcaccaccaccaccaccactgagatccggctgctaa

SEQ ID NO: 46 - DNA, 1173 bp, Papaver somniferum
cggtcgtcagactgtcgatgaagccctgaaagacgcgcagactggatccatggaaaccccaatcctgatcaaacttggcaacgggctctcgatccctagcgtccaagagctcgccaagttgaccctggccgagatcccaagtcggtatacatgcacaggtgagagcccacttaacaacatcggtgcgtcagtaacagacgatgaaacggtgccggtcattgatttgcaaaacttattaagtccagagccagtagtggggaaattagagttggacaagttacactccgcttgcaaagagtggggcttctttcagcttgtcaaccatggcgttgatgccttgttaatggacaacattaagagcgaaatcaagggcttttttaacctgccgatgaatgagaagaccaaatacggtcagcaggacggcgactttgaagggttcggtcagccttatattgaatctgaggatcagcgcttggattggactgaggtgttctcaatgctctcgctgccacttcacctgcgcaagccgcacctttttccagaacttccacttccgtttcgcgagaccctggagtcgtacttgagcaagatgaaaaaactgtcaacggtggtgtttgagatgttagaaaagagtttgcaacttgttgagattaaaggtatgactgacttgttcgaagacgggctccaaacgatgcgcatgaattactatcctccatgtccacggcctgagttggtattgggtcttacaagtcatagtgacttttctgggttgaccattttactccagttaaacgaagtggaggggttgcagattcggaaggaagagcggtggatcagcatcaaaccgcttccagacgcctttattgtcaacgtaggtgatattctcgaaattatgaccaacgggatctatcgtagtgttgagcaccgtgcagtcgtgaatagtaccaaggagcggctttccatcgccacattccatgactctaaattggaatccgaaatcggtcctatctcttcgttggttactcctgagacccctgcattattcaagcgcgggcgctacgaagacattctcaaggaaaacctttcgcgcaaacttgatggcaagtctttcctggattacatgcgtatctgactcgagcaccaccaccaccaccactgagatccggctgctaa

SEQ ID NO: 47 - DNA, 1173 bp, Papaver somniferum
cggtcgtcagactgtcgatgaagccctgaaagacgcgcagactggatccatggaaaccccaaaactgatcaaacttggcaacgggctctcgatccctagcgtccaagagctcgccaagttgaccctggccgagatcccaagtcggtatacatgcacaggtgagagcccacttaacaacatcggtgcgtcagtaacagacgatgaaacggtgccggtcattgatttgcaaaacttattaagtccagagccagtagtggggaaattagagttggacaagttacactccgcttgcaaagagtggggcttctttcagcttgtcaaccatggcgttgatgccttgttaatggacaacattaagagcgaaatcaagggcttttttaacctgccgatgaatgagaagaccaaatacggtcagcaggacggcgactttgaagggttcggtcagccttatattgaatctgaggatcagcgcttggattggactgaggtgttctcaatgctctcgctgccacttcacctgcgcaagccgcacctttttccagaacttccacttccgtttcgcgagaccctggagtcgtacttgagcaagatgaaaaaactgtcaacggtggtgtttgagatgttagaaaagagtttgcaacttgttgagattaaaggtatgactgacttgttcgaagacgggctccaaacgatgcgcatgaattactatcctccatgtccacggcctgagttggtattgggtcttacaagtcatagtgacttttctgggttgaccattttactccagttaaacgaagtggaggggttgcagattcggaaggaagagcggtggatcagcatcaaaccgcttccagacgcctttattgtcaacgtaggtgatattctcgaaattatgaccaacgggatctatcgtagtgttgagcaccgtgcagtcgtgaatagtaccaaggagcggctttccatcgccacattccatgactctaaattggaatccgaaatcggtcctatctcttcgttggttactcctgagacccctgcattattcaagcgcgggcgctacgaagacattctcaaggaaaacctttcgcgcaaacttgatggcaagtctttcctggattacatgcgtatctgactcgagcaccaccaccaccaccactgagatccggctgctaa

SEQ ID NO: 48 - DNA, 1173 bp, Papaver somniferum
cggtcgtcagactgtcgatgaagccctgaaagacgcgcagactggatccatggaaaccccaaaactgatcaaacttggcaacgggctctcgatccctagcgtccaagagctcgccaagttgaccctggccgagatcccaagtcggtatacatgcacaggtgagagcccacttaacaacatcggtgcgtcagtaacagacgatgaaacggtgccggtcattgatttgcaaaacttattaagtccagagccagtagtggggaaattagagttggacaagttacactccgcttgcaaagagtggggcttctttcagcttgtcaaccatggcgttgatgccttgttaatggacaacattaagagcgaaatcaagggcttttttaacctgccgatgaatgagaagaccaaatacggtcagcaggacggcgactttgaagggttcggtcagccttatattgaatctgaggatcagcgcttggattggactgaggtgttctcaatgctctcgctgccacttcacctgcgcaagccgcacctttttccagaacttccacttccgtttcgcgagaccctggagtcgtacttgagcaagatgaaaaaactgtcaacggtggtgtttgagatgttagaaaagagtttgcaacttgttgagattaaaggtatgactgacttgttcgaagacgggctccaaacgatgcgcatgaattactatcctccatgtccacggcctgagttggtattgggtcttacaagtcatagtgacttttctgggttgaccattttactccagttaaacgaagtggaggggttgcagattcggaaggaaggtcggtggatcagcatcaaaccgcttccagacgcctttattgtcaacgtaggtgatattctcgaaattatgaccaacgggatctatcgtagtgttgagcaccgtgcagtcgtgaatagtaccaaggagcggctttccatcgccacattccatgactctaaattggaatccgaaatcggtcctatctcttcgttggttactcctgagacccctgcattattcaagcgcgggcgctacgaagacattctcaaggaaaacctttcgcgcaaacttgatggcaagtctttcctggattacatgcgtatgtgactcgagcaccaccaccaccaccactgagatccggctgctaa

SEQ ID NO: 49 - DNA, 1173 bp, Papaver somniferum
cggtcgtcagactgtcgatgaagccctgaaagacgcgcagactggatccatggaaaccccaatcctgatcaaacttggcaacgggctctcgatccctagcgtccaagagctcgccaagttgaccctggccgagatcccaagtcggtatacatgcacaggtgagagcccacttaacaacatcggtgcgtcagtaacagacgatgaaacggtgccggtcattgatttgcaaaacttattaagtccagagccagtagtggggaaattagagttggacaagttacactccgcttgcaaagagtggggcttctttcagcttgtcaaccatggcgttgatgccttgttaatggacaacattaagagcgaaatcaagggcttttttaacctgccgatgaatgagaagaccaaatacggtcagcaggacggcgactttgaagggttcggtcagccttatattgaatctgaggatcagcgcttggattggactgaggtgttctcaatgctctcgctgccacttcacctgcgcaagccgcacctttttccagaacttccacttccgtttcgcgagaccctggagtcgtacttgagcaagatgaaaaaactgtcaacggtggtgtttgagatgttagaaaagagtttgcaacttgttgagattaaaggtatgactgacttgttcgaagacgggctccaaacgatgcgcatgaattactatcctccatgtccacggcctgagttggtattgggtcttacaagtcatagtgacttttctgggttgaccattttactccagttaaacgaagtggaggggttgcagattcggaaggaaggtcggtggatcagcatcaaaccgcttccagacgcctttattgtcaacgtaggtgatattctcgaaattatgaccaacgggatctatcgtagtgttgagcaccgtgcagtcgtgaatagtaccaaggagcggctttccatcgccacattccatgactctaaattggaatccgaaatcggtcctatctcttcgttggttactcctgagacccctgcattattcaagcgcgggcgctacgaagacattctcaaggaaaacctttcgcgcaaacttgatggcaagtctttcctggattacatgcgtatctgactcgagcaccaccaccaccaccactgagatccggctgctaa

SEQ ID NO: 50 - DNA, 1173 bp, Papaver somniferum
cggtcgtcagactgtcgatgaagccctgaaagacgcgcagactggatccatggaaaccccaaaactgatcaaacttggcaacgggctctcgatccctagcgtccaagagctcgccaagttgaccctggccgagatcccaagtcggtatacatgcacaggtgagagcccacttaacaacatcggtgcgtcagtaacagacgatgaaacggtgccggtcattgatttgcaaaacttattaagtccagagccagtagtggggaaattagagttggacaagttacactccgcttgcaaagagtggggcttctttcagcttgtcaaccatggcgttgatgccttgttaatggacaacattaagagcgaaatcaagggcttttttaacctgccgatgaatgagaagaccaaatacggtcagcaggacggcgactttgaagggttcggtcagccttatattgaatctgaggatcagcgcttggattggactgaggtgttctcaatgctctcgctgccacttcacctgcgcaagccgcacctttttccagaacttccacttccgtttcgcgagaccctggagtcgtacttgagcaagatgaaaaaactgtcaacggtggtgtttgagatgttagaaaagagtttgcaacttgttgagattaaaggtatgactgacttgttcgaagacgggctccaaacgatgcgcatgaattactatcctccatgtccacggcctgagttggtattgggtcttacaagtcatagtgacttttctgggttgaccattttactccagttaaacgaagtggaggggttgcagattcggaaggaaggtcggtggatcagcatcaaaccgcttccagacgcctttattgtcaacgtaggtgatattctcgaaattatgaccaacgggatctatcgtagtgttgagcaccgtgcagtcgtgaatagtaccaaggagcggctttccatcgccacattccatgactctaaattggaatccgaaatcggtcctatctcttcgttggttactcctgagacccctgcattattcaagcgcgggcgctacgaagacattctcaaggaaaacctttcgcgcaaacttgatggcaagtctttcctggattacatgcgtatctgactcgagcaccaccaccaccaccactgagatccggctgctaa

SEQ ID NO: 51 - DNA, 1173 bp, Papaver somniferum
cggtcgtcagactgtcgatgaagccctgaaagacgcgcagactggatccatggaaaccgcaatcctgatcaaacttggcaacgggctctcgatccctagcgtccaagagctcgccaagttgaccctggccgagatcccaagtcggtatacatgcacaggtgagagcccacttaacaacatcggtgcgtcagtaacagacgatgaaacggtgccggtcattgatttgcaaaacttattaagtccagagccagtagtggggaaattagagttggacaagttacactccgcttgcaaagagtggggcttctttcagcttgtcaaccatggcgttgatgccttgttaatggacaacattaagagcgaaatcaagggcttttttaacctgccgatgaatgagaagaccaaatacggtcagcaggacggcgactttgaagggttcggtcagccttatattgaatctgaggatcagcgcttggattggactgaggtgttctcaatgctctcgctgccacttcacctgcgcaagccgcacctttttccagaacttccacttccgtttcgcgagaccctggagtcgtacttgagcaagatgaaaaaactgtcaacggtggtgtttgagatgttagaaaagagtttgcaacttgttgagattaaaggtatgactgacttgttcgaagacgggctccaaacgatgcgcatgaattactatcctccatgtccacggcctgagttggtattgggtcttacaagtcatagtgacttttctgggttgaccattttactccagttaaacgaagtggaggggttgcagattcggaaggaaggtcggtggatcagcatcaaaccgcttccagacgcctttattgtcaacgtaggtgatattctcgaaattatgaccaacgggatctatcgtagtgttgagcaccgtgcagtcgtgaatagtaccaaggagcggctttccatcgccacattccatgactctaaattggaatccgaaatcggtcctatctcttcgttggttactcctgagacccctgcattattcaagcgcgggcgctacgaagacattctcaaggaaaacctttcgcgcaaacttgatggcaagtctttcctggattacatgcgtatctgactcgagcaccaccaccaccaccactgagatccggctgctaa

SEQ ID NO: 52 - DNA, 1173 bp, Papaver somniferum
cggtcgtcagactgtcgatgaagccctgaaagacgcgcagactggatccatggaaaccgcaaaactgatcaaacttggcaacgggctctcgatccctagcgtccaagagctcgccaagttgaccctggccgagatcccaagtcggtatacatgcacaggtgagagcccacttaacaacatcggtgcgtcagtaacagacgatgaaacggtgccggtcattgatttgcaaaacttattaagtccagagccagtagtggggaaattagagttggacaagttacactccgcttgcaaagagtggggcttctttcagcttgtcaaccatggcgttgatgccttgttaatggacaacattaagagcgaaatcaagggcttttttaacctgccgatgaatgagaagaccaaatacggtcagcaggacggcgactttgaagggttcggtcagccttatattgaatctgaggatcagcgcttggattggactgaggtgttctcaatgctctcgctgccacttcacctgcgcaagccgcacctttttccagaacttccacttccgtttcgcgagaccctggagtcgtacttgagcaagatgaaaaaactgtcaacggtggtgtttgagatgttagaaaagagtttgcaacttgttgagattaaaggtatgactgacttgttcgaagacgggctccaaacgatgcgcatgaattactatcctccatgtccacggcctgagttggtattgggtcttacaagtcatagtgacttttctgggttgaccattttactccagttaaacgaagtggaggggttgcagattcggaaggaaggtcggtggatcagcatcaaaccgcttccagacgcctttattgtcaacgtaggtgatattctcgaaattatgaccaacgggatctatcgtagtgttgagcaccgtgcagtcgtgaatagtaccaaggagcggctttccatcgccacattccatgactctaaattggaatccgaaatcggtcctatctcttcgttggttactcctgagacccctgcattattcaagcgcgggcgctacgaagacattctcaaggaaaacctttcgcgcaaacttgatggcaagtctttcctggattacatgcgtatctgactcgagcaccaccaccaccaccactgagatccggctgctaa

SEQ ID NO: 53 - protein, 360 aa, Papaver somniferum; identical to SEQ ID NO: 19

SEQ ID NO: 54 - protein, 360 aa, Papaver somniferum
MEKAKLMKLGNGLSIPSVQELAKLTLAEIPSRYTCTGESPLNNIGASVTDDETVPVIDLQNLLSPEPVVGKLELDKLHSACKEWGFFQLVNHGVDALLMDNIKSEIKGFFNLPMNEKTKYGQQDGDFEGFGQPYIESEDQRLDWTEVFSMLSLPLHLRKPHLFPELPLPFRETLESYLSKMKKLSTVVFEMLEKSLQLVEIKGMTDLFEDGLQTMRMNYYPPCPRPELVLGLTSHSDFSGLTILLQLNEVEGLQIRKEERWISIKPLPDAFIVNVGDILEIMTNGIYRSVEHRAVVNSTKERLSIATFHDSKLESEIGPISSLVTPETPALFKRGRYEDILKENLSRKLDGKSFLDYMRM

SEQ ID NO: 55 - protein, 360 aa, Papaver somniferum
METPILIKLGNGLSIPSVQELAKLTLAEIPSRYTCTGESPLNNIGASVTDDETVPVIDLQNLLSPEPVVGKLELDKLHSACKEWGFFQLVNHGVDALLMDNIKSEIKGFFNLPMNEKTKYGQQDGDFEGFGQPYIESEDQRLDWTEVFSMLSLPLHLRKPHLFPELPLPFRETLESYLSKMKKLSTVVFEMLEKSLQLVEIKGMTDLFEDGLQTMRMNYYPPCPRPELVLGLTSHSDFSGLTILLQLNEVEGLQIRKEERWISIKPLPDAFIVNVGDILEIMTNGIYRSVEHRAVVNSTKERLSIATFHDSKLESEIGPISSLVTPETPALFKRGRYEDILKENLSRKLDGKSFLDSMRI

SEQ ID NO: 56 - protein, 360 aa, Papaver somniferum
MEKAKLMKLGNGLSIPSVQELAKLTLAEIPSRYTCTGESPLNNIGASVTDDETVPVIDLQNLLSPEPVVGKLELDKLHSACKEWGFFQLVNHGVDALLMDNIKSEIKGFFNLPMNEKTKYGQQDGDFEGFGQPYIESEDQRLDWTEVFSMLSLPLHLRKPHLFPELPLPFRETLESYLSKMKKLSTVVFEMLEKSLQLVEIKGMTDLFEDGLQTMRMNYYPPCPRPELVLGLTSHSDFSGLTILLQLNEVEGLQIRKEERWISIKPLPDAFIVNVGDILEIMTNGIYRSVEHRAVVNSTKERLSIATFHDSKLESEIGPISSLVTPETPALFKRGRYEDILKENLSRKLDGKSFLDSMRI

SEQ ID NO: 57 - protein, 360 aa, Papaver somniferum
MEKPILIKLGNGLSIPSVQELAKLTLAEIPSRYTCTGESPLNNIGASVTDDETVPVIDLQNLLSPEPVVGKLELDKLHSACKEWGFFQLVNHGVDALLMDNIKSEIKGFFNLPMNEKTKYGQQDGDFEGFGQPYIESEDQRLDWTEVFSMLSLPLHLRKPHLFPELPLPFRETLESYLSKMKKLSTVVFEMLEKSLQLVEIKGMTDLFEDGLQTMRMNYYPPCPRPELVLGLTSHSDFSGLTILLQLNEVEGLQIRKEERWISIKPLPDAFIVNVGDILEIMTNGIYRSVEHRAVVNSTKERLSIATFHDSKLESEIGPISSLVTPETPALFKRGRYEDILKENLSRKLDGKSFLDYMRM

SEQ ID NO: 58 - protein, 360 aa, Papaver somniferum
METAILIKLGNGLSIPSVQELAKLTLAEIPSRYTCTGESPLNNIGASVTDDETVPVIDLQNLLSPEPVVGKLELDKLHSACKEWGFFQLVNHGVDALLMDNIKSEIKGFFNLPMNEKTKYGQQDGDFEGFGQPYIESEDQRLDWTEVFSMLSLPLHLRKPHLFPELPLPFRETLESYLSKMKKLSTVVFEMLEKSLQLVEIKGMTDLFEDGLQTMRMNYYPPCPRPELVLGLTSHSDFSGLTILLQLNEVEGLQIRKEERWISIKPLPDAFIVNVGDILEIMTNGIYRSVEHRAVVNSTKERLSIATFHDSKLESEIGPISSLVTPETPALFKRGRYEDILKENLSRKLDGKSFLDYMRM

SEQ ID NO: 59 - protein, 360 aa, Papaver somniferum
METPKLIKLGNGLSIPSVQELAKLTLAEIPSRYTCTGESPLNNIGASVTDDETVPVIDLQNLLSPEPVVGKLELDKLHSACKEWGFFQLVNHGVDALLMDNIKSEIKGFFNLPMNEKTKYGQQDGDFEGFGQPYIESEDQRLDWTEVFSMLSLPLHLRKPHLFPELPLPFRETLESYLSKMKKLSTVVFEMLEKSLQLVEIKGMTDLFEDGLQTMRMNYYPPCPRPELVLGLTSHSDFSGLTILLQLNEVEGLQIRKEERWISIKPLPDAFIVNVGDILEIMTNGIYRSVEHRAVVNSTKERLSIATFHDSKLESEIGPISSLVTPETPALFKRGRYEDILKENLSRKLDGKSFLDYMRM

SEQ ID NO: 60 - protein, 360 aa, Papaver somniferum
METPILMKLGNGLSIPSVQELAKLTLAEIPSRYTCTGESPLNNIGASVTDDETVPVIDLQNLLSPEPVVGKLELDKLHSACKEWGFFQLVNHGVDALLMDNIKSEIKGFFNLPMNEKTKYGQQDGDFEGFGQPYIESEDQRLDWTEVFSMLSLPLHLRKPHLFPELPLPFRETLESYLSKMKKLSTVVFEMLEKSLQLVEIKGMTDLFEDGLQTMRMNYYPPCPRPELVLGLTSHSDFSGLTILLQLNEVEGLQIRKEERWISIKPLPDAFIVNVGDILEIMTNGIYRSVEHRAVVNSTKERLSIATFHDSKLESEIGPISSLVTPETPALFKRGRYEDILKENLSRKLDGKSFLDYMRM

SEQ ID NO: 61 - protein, 360 aa, Papaver somniferum
METPILIKLGNGLSIPSVQELAKLTLAEIPSRYTCTGESPLNNIGASVTDDETVPVIDLQNLLSPEPVVGKLELDKLHSACKEWGFFQLVNHGVDALLMDNIKSEIKGFFNLPMNEKTKYGQQDGDFEGFGQPYIESEDQRLDWTEVFSMLSLPLHLRKPHLFPELPLPFRETLESYLSKMKKLSTVVFEMLEKSLQLVEIKGMTDLFEDGLQTMRMNYYPPCPRPELVLGLTSHSDFSGLTILLQLNEVEGLQIRKEERWISIKPLPDAFIVNVGDILEIMTNGIYRSVEHRAVVNSTKERLSIATFHDSKLESEIGPISSLVTPETPALFKRGRYEDILKENLSRKLDGKSFLDSMRM

SEQ ID NO: 62 - protein, 360 aa, Papaver somniferum
METPILIKLGNGLSIPSVQELAKLTLAEIPSRYTCTGESPLNNIGASVTDDETVPVIDLQNLLSPEPVVGKLELDKLHSACKEWGFFQLVNHGVDALLMDNIKSEIKGFFNLPMNEKTKYGQQDGDFEGFGQPYIESEDQRLDWTEVFSMLSLPLHLRKPHLFPELPLPFRETLESYLSKMKKLSTVVFEMLEKSLQLVEIKGMTDLFEDGLQTMRMNYYPPCPRPELVLGLTSHSDFSGLTILLQLNEVEGLQIRKEERWISIKPLPDAFIVNVGDILEIMTNGIYRSVEHRAVVNSTKERLSIATFHDSKLESEIGPISSLVTPETPALFKRGRYEDILKENLSRKLDGKSFLDYMRI

SEQ ID NO: 63 - protein, 360 aa, Papaver somniferum
METPKLIKLGNGLSIPSVQELAKLTLAEIPSRYTCTGESPLNNIGASVTDDETVPVIDLQNLLSPEPVVGKLELDKLHSACKEWGFFQLVNHGVDALLMDNIKSEIKGFFNLPMNEKTKYGQQDGDFEGFGQPYIESEDQRLDWTEVFSMLSLPLHLRKPHLFPELPLPFRETLESYLSKMKKLSTVVFEMLEKSLQLVEIKGMTDLFEDGLQTMRMNYYPPCPRPELVLGLTSHSDFSGLTILLQLNEVEGLQIRKEERWISIKPLPDAFIVNVGDILEIMTNGIYRSVEHRAVVNSTKERLSIATFHDSKLESEIGPISSLVTPETPALFKRGRYEDILKENLSRKLDGKSFLDYMRI

SEQ ID NO: 64 - protein, 360 aa, Papaver somniferum
METPKLIKLGNGLSIPSVQELAKLTLAEIPSRYTCTGESPLNNIGASVTDDETVPVIDLQNLLSPEPVVGKLELDKLHSACKEWGFFQLVNHGVDALLMDNIKSEIKGFFNLPMNEKTKYGQQDGDFEGFGQPYIESEDQRLDWTEVFSMLSLPLHLRKPHLFPELPLPFRETLESYLSKMKKLSTVVFEMLEKSLQLVEIKGMTDLFEDGLQTMRMNYYPPCPRPELVLGLTSHSDFSGLTILLQLNEVEGLQIRKEGRWISIKPLPDAFIVNVGDILEIMTNGIYRSVEHRAVVNSTKERLSIATFHDSKLESEIGPISSLVTPETPALFKRGRYEDILKENLSRKLDGKSFLDYMRM

SEQ ID NO: 65 - protein, 360 aa, Papaver somniferum
METPILIKLGNGLSIPSVQELAKLTLAEIPSRYTCTGESPLNNIGASVTDDETVPVIDLQNLLSPEPVVGKLELDKLHSACKEWGFFQLVNHGVDALLMDNIKSEIKGFFNLPMNEKTKYGQQDGDFEGFGQPYIESEDQRLDWTEVFSMLSLPLHLRKPHLFPELPLPFRETLESYLSKMKKLSTVVFEMLEKSLQLVEIKGMTDLFEDGLQTMRMNYYPPCPRPELVLGLTSHSDFSGLTILLQLNEVEGLQIRKEGRWISIKPLPDAFIVNVGDILEIMTNGIYRSVEHRAVVNSTKERLSIATFHDSKLESEIGPISSLVTPETPALFKRGRYEDILKENLSRKLDGKSFLDYMRI

SEQ ID NO: 66 - protein, 360 aa, Papaver somniferum
METPKLIKLGNGLSIPSVQELAKLTLAEIPSRYTCTGESPLNNIGASVTDDETVPVIDLQNLLSPEPVVGKLELDKLHSACKEWGFFQLVNHGVDALLMDNIKSEIKGFFNLPMNEKTKYGQQDGDFEGFGQPYIESEDQRLDWTEVFSMLSLPLHLRKPHLFPELPLPFRETLESYLSKMKKLSTVVFEMLEKSLQLVEIKGMTDLFEDGLQTMRMNYYPPCPRPELVLGLTSHSDFSGLTILLQLNEVEGLQIRKEGRWISIKPLPDAFIVNVGDILEIMTNGIYRSVEHRAVVNSTKERLSIATFHDSKLESEIGPISSLVTPETPALFKRGRYEDILKENLSRKLDGKSFLDYMRI

SEQ ID NO: 67 - protein, 360 aa, Papaver somniferum
METAILIKLGNGLSIPSVQELAKLTLAEIPSRYTCTGESPLNNIGASVTDDETVPVIDLQNLLSPEPVVGKLELDKLHSACKEWGFFQLVNHGVDALLMDNIKSEIKGFFNLPMNEKTKYGQQDGDFEGFGQPYIESEDQRLDWTEVFSMLSLPLHLRKPHLFPELPLPFRETLESYLSKMKKLSTVVFEMLEKSLQLVEIKGMTDLFEDGLQTMRMNYYPPCPRPELVLGLTSHSDFSGLTILLQLNEVEGLQIRKEGRWISIKPLPDAFIVNVGDILEIMTNGIYRSVEHRAVVNSTKERLSIATFHDSKLESEIGPISSLVTPETPALFKRGRYEDILKENLSRKLDGKSFLDYMRI

SEQ ID NO: 68 - protein, 360 aa, Papaver somniferum
METAKLIKLGNGLSIPSVQELAKLTLAEIPSRYTCTGESPLNNIGASVTDDETVPVIDLQNLLSPEPVVGKLELDKLHSACKEWGFFQLVNHGVDALLMDNIKSEIKGFFNLPMNEKTKYGQQDGDFEGFGQPYIESEDQRLDWTEVFSMLSLPLHLRKPHLFPELPLPFRETLESYLSKMKKLSTVVFEMLEKSLQLVEIKGMTDLFEDGLQTMRMNYYPPCPRPELVLGLTSHSDFSGLTILLQLNEVEGLQIRKEGRWISIKPLPDAFIVNVGDILEIMTNGIYRSVEHRAVVNSTKERLSIATFHDSKLESEIGPISSLVTPETPALFKRGRYEDILKENLSRKLDGKSFLDYMRI

SEQ ID NO: 69 - DNA, 20 bp, Artificial sequence
  primer sequence
gaaatcatgccgaacatccc

SEQ ID NO: 70 - DNA, 24 bp, Artificial sequence
  primer sequence
ccggatatagttcctcctttcagc

SEQ ID NO: 71 - DNA, 22 bp, Artificial sequence
  primer sequence
tccaccgtttttccttccgaat

SEQ ID NO: 72 - DNA, 25 bp, Artificial sequence
  primer sequence
gattcggaaggaaaaacggtggatc

SEQ ID NO: 73 - DNA, 21 bp, Artificial sequence
  primer sequence
cggtcgtcagactgtcgatga

SEQ ID NO: 74 - DNA, 20 bp, Artificial sequence
  primer sequence
ttagcagccggatctcagtg

SEQ ID NO: 75 - DNA, 22 bp, Artificial sequence
  primer sequence
tccaccggtcttccttccgaat

SEQ ID NO: 76 - DNA, 25 bp, Artificial sequence
  primer sequence
gattcggaaggaagaccggtggatc

SEQ ID NO: 77 - DNA, 22 bp, Artificial sequence
  primer sequence
tccaccgatgttccttccgaat

SEQ ID NO: 78 - DNA, 25 bp, Artificial sequence
  primer sequence
gattcggaaggaacatcggtggatc

SEQ ID NO: 79 - DNA, 22 bp, Artificial sequence
  primer sequence
tccaccgttgttccttccgaat

SEQ ID NO: 80 - DNA, 25 bp, Artificial sequence
  primer sequence
gattcggaaggaacaacggtggatc

SEQ ID NO: 81 - DNA, 22 bp, Artificial sequence
  primer sequence
tccaccgtgcttccttccgaat

SEQ ID NO: 82 - DNA, 25 bp, Artificial sequence
  primer sequence
gattcggaaggaagcacggtggatc

SEQ ID NO: 83 - DNA, 22 bp, Artificial sequence
  primer sequence
tccaccgactttccttccgaat

SEQ ID NO: 84 - DNA, 25 bp, Artificial sequence
  primer sequence
gattcggaaggaaagtcggtggatc

SEQ ID NO: 85 - DNA, 22 bp, Artificial sequence
  primer sequence
tccaccgaccttccttccgaat

SEQ ID NO: 86 - DNA, 25 bp, Artificial sequence
  primer sequence
gattcggaaggaaggtcggtggatc

SEQ ID NO: 87 - DNA, 22 bp, Artificial sequence
  primer sequence
tccacgtctcttccttccgaat

SEQ ID NO: 88 - DNA, 25 bp, Artificial sequence
  primer sequence
gattcggaaggaagagacgtggatc

SEQ ID NO: 89 - DNA, 22 bp, Artificial sequence
  primer sequence
tccacgtaccttccttccgaat

SEQ ID NO: 90 - DNA, 25 bp, Artificial sequence
  primer sequence
gattcggaaggaaggtacgtggatc

SEQ ID NO: 91 - DNA, 25 bp, artificial sequence
  homologe vector region upstream or downstream of insert
cctgaaagacgcgcagactggatcc

SEQ ID NO: 92 - DNA, 40 bp, artificial sequence
  homologe vector region upstream or downstream of insert
ctcgagcaccaccaccaccaccactgagatccggctgcta
